(19) United States
(12) Patent Application Publication
(10) Pub. No.: US 2021/0010038 A1
(43) Pub. Date: Jan. 14, 2021

(54) ENZYMATIC PROCESS FOR PRODUCTION OF MODIFIED HOP PRODUCTS

(71) Applicant: KALAMAZOO HOLDINGS, INC., Kalamazoo, MI (US)

(72) Inventors: Katie WHALEN, Charlottesville, VA (US); Donald Richard Berdahl, Lawton, MI (US); Brian Patrick Buffin, Yakima, WA (US); Matthew Blake Jones, Portage, MI (US); Katrina Williams, Riner, VA (US)

(21) Appl. No.: 17/030,636

(22) Filed: Sep. 24, 2020

Related U.S. Application Data
(63) Continuation-in-part of application No. 16/583,762, filed on Sep. 26, 2019.
(60) Provisional application No. 62/736,555, filed on Sep. 26, 2018.

(51) Int. Cl. C12P 7/40; C12N 9/06

(52) U.S. Cl. CPC C12P 7/40; C12Y 101/01; C12N 9/0016

(57) ABSTRACT

The present invention relates to a process for producing a beer bite ring agent via enzyme catalyzed bioconversion of hop-derived isoalpha acids to dihydro-(rho)-isoalpha acids.

### REFERENCE TO SEQUENCE LISTING TABLE OR COMPUTER PROGRAM

[0001] The Sequence Listing concurrently submitted herewith under 37 CFR §1.82 in a computer readable form (CRF) via EFS-Web as file name SEQUENCE_LISTING_KALSEC_75.txt is herein incorporated by reference. The electronic copy of the Sequence Listing was created on 21 Sep. 2020, with a file size of 667 kilobytes.

### FIELD OF THE INVENTION

[0002] The present invention relates to a process for producing a beer bittering agent via enzyme catalyzed bioconversion of hop-derived isoalpha acids to dihydro-(rho)-isoalpha acids. Dihydro-(rho)-isoalpha acids have superior characteristics which improve utility as a beverage additive. Consumers may prefer dihydro-(rho)-isoalpha acids produced via this process, which does not require the use of harsh chemical reagents and which utilizes enzymes which may be naturally occurring

### BACKGROUND OF THE INVENTION

[0003] Traditional methods of bittering beer use whole fresh hops, whole dried hops, or hop pellets added during the kettle boil. Hop extracts made by extracting hops with supercritical carbon dioxide, or isomerized hop pellets, made by heating hops in the presence of a catalyst are more recent bittering innovations that have also been adopted by brewers. Hop pellets can also be added later in the brewing process and in the case of dry hopping, hops are added to the finished beer prior to filtration, These methods suffer from a poor utilization of the bittering compounds present in the hops, which impacts the cost unfavorably. Beer or other malt beverages produced in this manner are unstable to light and must be packaged in dark brown bottles or cans or placed to avoid the light induced formation of 3-methyl-2-butene-1-thiol (3-MBT) which gives a pronounced light-struck or skunky aroma. Placing bottles in cardboard boxes or completely wrapping them in light-proof or light-filtering paper, foil, or plastic coverings is another expensive method of protecting these beverages from light-struck flavor and aroma.

[0004] Bitterness in traditionally brewed beer is primarily derived from isoalpha acids. These compounds are formed during the brewing process by the isomerization of the humulones, which are naturally occurring compounds in the lupulin glands of the hop plant. A consequence of this is, given the natural instability of the isoalpha acids towards photochemical reactions in beer, a beverage prone to the formation of light-struck or skunky flavor and aroma.

[0005] Fully light stable beers or other malt beverages can be prepared using so-called advanced or modified hop acids. Beers made using these bittering agents can be packaged in non-colored flint glass bottles without fear of forming skunky aromas. Dihydro-(rho)-isoalpha acids are reduction products of isoalpha acids which are light stable. To date, these compounds have not been found in nature. Traditionally, the portion of the isoalpha acids which is responsible for the photochemistry has been altered by reduction of a carbonyl group using sodium borohydride.

[0006] Sodium borohydride is an inorganic compound that can be utilized for the reduction of ketones. It is extremely hazardous in case of skin contact, eye contact, inhalation, or ingestion, with an oral LD50 of 160 mg/kg (rat), Sodium borohydride is also flammable, corrosive, and extremely reactive with oxidizing agents, acids, alkalis, and moisture (Sodium Borohydride; MSDS No. S9125 Sigma-Aldrich Co.: Saint Louis, Mo. Nov. 1, 2015.

[0007] Consumers are increasingly expressing a preference for natural materials over synthetic or semi-synthetic ones. Thus, a need exists not only to provide compositions employing natural materials as bittering agents for beer and other beverages, but also processes for more natural production of said materials.

[0008] Biocatalytic production is an emerging technology which provides highly elective, safe, clean, and scalable production of high value compounds. Biocatalytic; production relies on naturally occurring enzymes to replace chemical catalysts.

[0009] Enzymes are naturally occurring proteins capable of catalyzing specific chemical reactions. Enzymes exist in nature that are currently capable of replacing chemical catalysts in the production of modified hop bittering compounds (Robinson, P. K, Enzymes: principles and biotechnological applications. Essays Biochem 2015, 59, 1-41.).

[0010] Humulone is a natural secondary metabolite that would be exposed to fungi and bacteria cohabitating with the plant, Humulus lupulus. It is possible that soil- and plant-dwelling fungi and bacteria possess enzymes capable of modifying humulone for detoxification or scavenging purposes. Additionally, organisms may have evolved enzymes to modify humulone-like molecules, but because of promiscuous activity, these enzymes possess activity against the compounds of interest, isoalpha acids (Hult, K.; Berglund, P., Enzyme promiscuity: mechanism and applications. Trends Biotechnol. 2007, 25 (5), 231-238; Nobeli, I.; Favia, A. D.; Thornton, J. M., Protein promiscuity and its implications for biotechnology. Nat. Biotechnol. 2009, 27 (2), 157-167.).

[0011] Enzymes which catalyze oxidation/reduction reactions, that is transfer of hydrogen and oxygen atoms or electrons from one substance to another, are broadly classified as oxidoreductases. More specifically, enzymes that reduce ketone groups to hydroxyl groups are known as ketoreductases or carbonyl reductases and depend on the supplementation of an exogenous source of reducing equivalents (e.g. the cofactors NADH, NADPH). Consistent with the existing naming of the enzymes characterized herein, the enzymes will be referred to as a “ketoreductases”.

[0012] The cost of expensive cofactors (NADH, NADPH) can be reduced by including additional enzymes and substrates for cofactor recycling, for example glucose dehydrogenase and glucose, or by utilizing a ketoreductase that is also capable of oxidizing a low-cost and natural feedstock, such as ethanol.

[0013] Abundant precedence exists for the utility of enzymes in brewing and their favorable influence on the final character of beer (Pozen, M., Enzymes in Brewing, Ind. Eng. Chem, 1934, 26 (11), 1127-1133.). The presence of yeast enzymes in the natural fermentation of beer is known to produce compounds that affect the flavor and aroma of the final beverage (Praet, T. Opstaele, F.; Jaskula-Goirts, B.; Aorta, G.; De Cooman, L., Biotransformations of hop-derived aroma compounds by Saccharomyces cerevisiae upon fermentation. Cerevisia, 2012, 36, 125-132.). Exogenously added enzymes provide a variety of improvements to the brewing process, such as reduced viscosity, increased fermentable sugars, chill-proofing and clarification (Wallerstein, L. (1947) Bentonite and Proteolytic Enzyme Treatment of Beer, U.S. Pat. No. 2,433,411.; Ghionno, L.; Marconi, O.; Sileoni, V.; De Francesco, G.; Perretti, G., Brewing with prolyl endopeptidase from Aspergillus niger; the impact of enzymatic treatment on gluten levels, quality attributes, and sensory profile. Int. J. Food Sci. Technol, 2017, 52 (6), 1367-1374.) Additionally, hop extracts have been specifically pretreated with enzymes for modifying hop-derived aroma compounds (Gras, Tran, T. T. H.; Collin, S., Enzymatic release of odourant polyfunctional thiols from cysteine conjugates in hop. J. Inst. Brew. 2013, 119 (4), 221-227.).

[0014] Prior to the present invention, however, enzymes capable of catalyzing the reduction of isoalpha acids to dihydro-(rho)-isoalpha acids have not been observed in nature, and thus have not been described in the literature. The process disclosed herein represents a novel enzymatic reaction.

### OBJECT OF THE INVENTION

[0015] It is an object of the present invention to provide a process for enzymatic production of dihydro-(rho)-isoalpha acids, a modified version of natural bittering agents derived from the hop plant. The present process is designed to replace current production processes which utilize the chemical reagent, sodium, borohydride.

### SUMMARY OF THE INVENTION

[0016] The present invention relates to a process that can be scaled up to industrial levels for bioconversion of iso-alpha acids into dihydro-(rho)-isoalpha acids, which can then be used as a naturally derived and light stable bitteririg agent in beverages.

[0017] One aspect of the present invention is a process for the high-yield bioconversion of iso-alpha acids into dihydro-(rho)-isoalpha acids utilizing a ketoreductase enzyme or a microorganism expressing a gene that encodes said ketoreductase.

[0018] A further aspect of the invention relates to such a process for production of dihydro-(rho)-isoalpha acids, wherein the process is carried out in an aqueous system with mild temperature and pH conditions, making it an environmentally benign manufacturing process.

[0019] In an embodiment of the invention, bioconversion of isoalpha acids to dihydro-(rho)-isoalpha acids comprises the addition of purified ketoreductase enzyme and NADPH or NADP to a mixture of isoalpha acids followed by incubation until the desired yield is obtained.

[0020] In another embodiment of the invention, bioconversion of isoalpha acids to dihydro-(rho)-isoalpha acids comprises the addition of purified ketoreductase enzyme and NADPH or NADP to a mixture of isoalpha acids in the presence of isopropanol for cofactor recycling, followed by incubation until the desired yield is obtained.

[0021] In a further embodiment of the invention, the concentration of isoalpha acids, i.e. the substrate, is maximized to increase the volumetric productivity of the bioconversion.

[0022] In a further embodiment of the invention, the concentration of the cofactor NADPH or NADP in the mixture is minimized to improve the economics of the bioconversion.

[0023] In a further embodiment of the invention, the bioconversion is performed in a vessel purged of air with an inert gas such as nitrogen or argon to prevent the formation of degradation products.

[0024] In an embodiment of the invention,bioconversion of isoalpha acids to dihydro (rho)-isoalpha acids comprises the addition of purified ketoreductase enzyme and NADPH or NADP to a mixture of isoalpha acids in the presence of another enzyme (such as glucose dehydrogenase) for cofactor recycling, followed by incubation until the desired yield is obtained.

[0025] In another embodiment of the invention, bioconversion of isoalpha acids to dihydro-(rho)-isoalpha acids comprises the addition of a whole cell biocatalyst to a mixture of isoalpha acids followed by incubation until the desired yield is obtained, wherein the whole cell biocatalyst is an immobilized microorganism expressing the gene which encodes a ketoreductase.

[0026] In another embodiment of the invention, bioconversion of isoalpha acids to dihydro-(rho)-isoalpha acids comprises the feeding of isoalpha acids to a growing microorganism expressing the gene which encodes a ketoreductase.

[0027] In another embodiment of the invention, bioconversion of alpha acids to, dihydr(rho)-isoalpha acids comprises the addition of thermostable ketoreductase enzyme to an extract of alpha acids wherein heat is applied, and the mixture is incubated until the desired yield of dihydro-(rho)-isoalpha acids is achieved.

[0028] In another embodiment of the invention, the ketoreductase employed in the process according to the present invention displays a preference for reducing the carbonyl group in the side chain at C(4) of the isoalpha acids, converting the light-sensitive acyloin group to a secondary alcohol, and producing a light-stable isoalpha acid derivative (FIG. 1).

[0029] In another embodiment of the invention, the ketoreductase employed in the process according to the present invention advantageously displays minimal or no preference for catalyzing reduction of any one particular member of the six major isoalpha acids: cis-isohumulone, trans-isohumulone, cis-isocohumulone, trans-isocohumulone, cis-isoadhumulone, and trans-isoadhumulone.

[0030] In another embodiment of the invention, the ketoreductase employed in the process according to the present invention, specifically reduces cis-isohumulone, cis-isocohumulone, and cis-isoadhumulone.

[0031] In another embodiment of the invention, the ketoreductase employed in the process according to the present invention specifically reduces trans-isohumulone, frons-isocohumulone, and trans-isoadhumulone.

[0032] In another embodiment of the invention, a mixture of 2 or more ketoreductase enzymes displaying the above substrate specificity is employed in the process according to the present invention to reduce a mixture of cis- and trans-isoalpha acids, to their respective dihydroisoalpha acids.

[0033] In another embodiment of the invention, a mixture of 2 or more ketoreductase enzymes displaying substrate specificity can be added to a reaction mixture to produce a unique mixture of dihydroisoalpha acids that is distinct from that produced by chemical reducing agents, such as sodium borohydride.

[0034] In a further embodiment, the present invention relates to a process as defined above, wherein the commercially available ketoreductase is selected from KRED-P1-B05, KRED-P2-B02, KRED-P2-0O2, KRED-P2-C11, KRED-P2-D11, KRED-P2-G03, KRED-P2-G09, KRED-101, KR ED-119, KRED-130, KRED-NADH-110, KRED-430, KRED-431, KRED-432, KRED-433, KRED-434, KRED-435, and KRED-436.

[0035] A further embodiment of the invention relates to a ketoreductase enzyme which comprises the amino acid sequence of SEQ ID NO: 4, SEQ ID NO: 6, SEQ ID NO: 80, SEQ ID NO: 104, SEQ ID NO: 100, SEQ ID NO: 136, SEQ ID NO: 116, SEQ ID NO: 132, SEQ ID NO: 162, SEQ ID NO: 150, SEQ ID NO: 152, SEQ ID NO: 144, SEQ ID NO: 146 or SEQ ID NO: 158.

[0036] In a further embodiment, the present invention relates to a process as defined above, wherein the ketoreductase enzyme or microorganism expressing a gene which encodes the ketoreductase enzyme can optionally have one or more differences at amino acid residues as compared to the ketoreductase enzyme which comprises the amino acid sequence of SEQ ID NO; 4, SEQ ID NO: 6, SEQ ID NO: 80, SEQ ID NO: 104, SEQ ID NO: 100, SEQ ID NO: 136, SEQ ID NO: 116, SEQ ID NO: 132, SEQ ID NO: 162, SEQ ID NO: 150, SEQ ID NO: 152, SEQ ID NO: 144, SEQ ID NO: 146 or SEQ ID NO: 158.

[0037] In a further embodiment, the present invention relates to a process es defined above, wherein the ketoreductase is 99, 95, 90, 85, 80, 75 or 70 percent homologous to the ketoreductase enzyme which comprises the amino acid sequence of SEQ ID NO: 4, SEQ ID NO; 6, SEQ ID NO: 80, SEQ ID NO: 104, SEQ ID NO: 100, SEQ ID NO: 136, SEQ ID NO: 116, SEQ ID NO: 132, SEQ ID NO: 162, SEQ ID NO: 150, SEQ ID NO: 152, SEQ ID NO: 144, SEQ ID NO: 146 or SEQ ID NO: 158.

[0038] In a further embodiment, the present invention relates to a process es defined above, wherein the ketoreductase is 99, 95, 90, 85, 80, 75 or 70 percent homologous to the ketoreductase enzyme which comprises the amino acid sequence of SEQ ID NO: 172, SEQ ID NO: 186, SEQ ID NO: 194, SEQ ID NO: 196, SEQ ID NO: 252, SEQ ID NO: 270, SEQ ID NO: 272, SEQ ID NO: 286, SEQ ID NO: 300, SEQ ID NO: 328, SEQ ID NO: 330, SEQ ID NO: 346, SEQ ID NO: 348 and SEQ ID NO: 356.

### BRIEF DESCRIPTION OF THE DRAWINGS

[0039] FIG. 1 shows the enzyme catalyzed reduction of a representative epimer of isoalpha acids.

[0040] FIG. 2 shows a UPLC chromatogram for Codexis KRED-P1-B05 (SEQ ID NO: 4) incubated with isoalpha Acids (acidic solution) for 48 hr at 30° C.

[0041] FIG. 3 shows an HPLC chromatogram and peak quantitation for Codexis KRED-P1-B05 (SEQ ID NO: 4) incubated with Isoalpha Acids (acidic solution) for 48 hr at 30° C.

[0042] FIG. 4 shows UPLC chromatogram for Codexis KRED-433 incubated with Isoalpha Acids for 24 hr at 30° C.

[0043] FIG. 5 shows improved KRED Activity of SEQ ID NO: 80, 104, 100, 136, 116, 132, 162, 150, 152, 144, 146 and 158 at High Substrate and low NADP Concentration.

[0044] FIG. 6 shows improved KRED activity of SEQ ID NO: 6, SEQ ID NO: 80, SEQ ID NO: 104, SEQ ID NO: 172, SEQ ID NO: 186, SEQ ID NO: 194, SEQ ID NO: 252, SEQ ID NO: 270, SEQ ID NO: 272, SEQ ID NO: 286, SEQ ID NO: 328, SEQ ID NO: 330, and SEQ ID NO: 346 compared to SEQ ID NO: 4 where %-conversion increases at increasing concentrations of isoalpha acids (substrate).

### DETAILED DESCRIPTION OF THE INVENTION

[0045] In this invention, a ketoreductase enzyme replaces the function of sodium borohydride and allows a more natural production method for the beverage additive, dihydro-(rho)-isoalpha acids. The enzyme may be any ketoreductase specifically reducing a ketone group to a hydroxy group of any or all isomers of isoalpha acid (co-, n- ad-, and cis/trans-). The enzyme may be derived from, but not limited to, bacteria, fungi, or plants. The enzyme may be cofactor dependent (NADH or NADPH) or independent.

[0046] Herein, “isoalpha acids”, “hop isoalpha acids”, and “hop-derived iscalpha acids” may be used interchangeably.

[0047] Isoalpha acid solution is subjected to enzymatic treatment using a purified enzyme or a mixture containing an enzyme and optionally additional enzymes for cofactor recycling. The amount of enzyme depends on the incubation parameters including duration, temperature, amount and concentration of substrate.

[0048] Alternatively, an isoalpha acid solution is subjected to enzymatic treatment using a mixture containing a microorganism expressing said enzyme. The invention furthermore provides a process for reducing isoalpha acids according to the invention, which comprises cultivating a ketoreductase-producing microorganism, if appropriate inducing the expression of the ketoreductase. Intact cells can be harvested and added directly to a reaction, in place of isolated enzyme, for the reduction of isoalpha acids as described above. Furthermore, the harvested cells can be immobilized prior to addition to a reduction reaction. The microorganism can be cultivated and fermented by known methods. The microorganism can be bacteria or fungi.

[0049] A mixture of cis- and trans-isoalpha acids may be incubated with a single ketoreductase displaying the capacity to reduce both isomers. Alternatively, a mixture of cis- and trans-isoaipha acids may be incubated with 2 or more ketoreductases showing varying specificity where the resulting product is a mixture of cis- and trans-dihydroisoalpha acids.

[0050] Alternatively, a solution containing only cis-isoalpha acids may be incubated with a ketoreductase specific for the cis-isomer, and the resulting product is a solution of cis-dihydroisoalpha acids. A solution of only cis-dihydroisoalpha acids may display advantageous bitterness and/or thermal stability properti

[0051] Alternatively, a solution containing only trans-isoalpha acids may be incubated with a ketoreductase specific for the trans-isomer, and the resulting product is solution of trans-dihydroisoalpha acids. A solution of only trans-dihydroisoalpha acids may display advantageous bitterness properties.

[0052] Customized blends of trans- and cis-isoalpha acids may be incubated with or more ketoreductases displaying variable substrate specificity, to produce unique blends of dihydroisoalpha acids otherwise unattainable.

[0053] An isoalpha acid ixture may be subjected to an enzymatic reaction using ketoreductase enzyme in addition to enzymes for catalyzing additional desired modifications, such as but not limited to, dehydrogenases, isomerases, hydratases and lyases. Enzymes of varying activity may be combined in a one pot reaction or added sequentially,

[0054] A suitable solvent to use in the enzyme incubation includes water and mixtures of water with another solvent compatible with the enzyme, such as ethanol or isopropanol. Enzymatic activity benefits from buffering of aqueous solutions. Buffering agents include, but are not limited to: tris(hydroxymethyl)aminomethane (aka. Tris), 4-(2-hydroxyethyl)piperazine-1-ethanesulfonic acid (aka. HEPES), sodium phosphate, and potassium phosphate.

[0055] The enzyme and isoalpha acids are incubated within a suitable pH range, for example pH 6 to 10, and temperature range, for example 10 to 90° C., and held at this temperature for a sufficient time to convert isoalpha acids to the desired dihydro-(rho)-isoalpha acids yield. Continuous stirring will ensure a constant temperature and exposure of substrate to enzyme. The reaction duration, typically 24 to 48 hours, will depend on the amount and concentration of the enzyme and substrate, solvent present, and temperature chosen.

[0056] Enzyme may be free in solution, immobilized onto beads or similarr mixable scaffolds, or immobilized onto a film or resin over which a solution of isoalpha acids is passed. The purity level of the enzyme may vary from 30 to 90+% depending on the purification method.

[0057] Enzyme may be removed from the final product via physical filtering or centrrifuation. Enzyme may also be rendered inactive by extreme temperature or pH and remain in the final product.

[0058] As used herein ketoreductase includes commercially available ketoreductases such as KRED-P1-B05, KRED-P2-B02, KRED-P2-C02, KRED-P2-C11, KRED-P2-D11, KRED-P2-G03, KRED-P2-G09, KRED-101, KRED-119, KRED-30, KRED-NADH-110, KRED-430, KRED-431, KRED-432, KRED-433, KRED-434, KRED-435, and KRED-436 (available from Codexis, Inc., Redwood City, Calif.). The invention also contemplates the foregoing ketoreductase which embody one or more differences in amino acid residues, as well as ketoreductase having 99, 95, 90, 85, 80, 75 and/or 70 percent homology with the foregoing ketoreductases.

[0059] The invention also includes ketoreductases purposely produced through known mutagenesis methods displaying variable activity on a single or a mixture of isoalpha acids such as SEQ ID NO: 80, SEQ ID NO: 104, SEQ ID NO: 172, SEQ ID NO: 186, SEQ ID NO: 194, SEQ ID NO; 196, SEQ ID NO: 252, SEQ ID NO: 270, SEQ ID NO: 272, SEQ ID NO: 286, SEQ ID NO: 300, SEQ ID NO: 328, SEQ ID NO: 330, SEQ ID NO: 346, SEQ ID NO: 348 and SEQ ID NO: 356. Some variants are significantly improved in substrate tolerance, temperature tolerance, solvent tolerance, substrate specificity (or lack thereof) and/or turnover compared to commercially available ketoreductases.

[0060] As used herein, “percentage of sequence homology,” “percent homology,” and “percent identical” refer to comparisons between polynucleotide sequences or polypeptide sequences, and are determined by comparing two optimally aligned sequences over a comparison window, wherein the portion of the polynucleotide or polypeptide sequence in the comparison window may comprise additions or deletions (i.e., gaps) as compared to the reference sequence for optimal alignment of the two sequences. The percentage is calculated by determining the number of positions at which either the identical nucleic acid base or amino acid residue occurs in both sequences or a nucleic acid base or amino acid residue is aligned with a gap to yield the number of matched positions, dividing the number of matched positions by the total number of positions in the window of comparison and multiplying the result by 100 to yield the percentage of sequence identity. Determination of optimal alignment and percent sequence homology is performed using the BLAST and BLAST 2.0 algorithms (See e.g., Altschul et al., J. Mol. Biol. 215: 403-410 [1990]; and Altschul et al., Nucleic Acids Res. 3389-3402 [1977]). Software for performing BLAST analyses is publicly available through the National Center for Biotechnology Information website.

### EXAMPLES

[0061] The following examples illustrate the invention without limiting its scope.

### Example 1

### E. coli Expression Hosts Containing Recombinant KRED Genes

[0062] KRED-encoding genes were cloned into the expression vector pCK110900 (See, FIG. 3 of US Pat. Appln. Publn. No. 200610195947), operatively linked to the lac promoter under control of the lac1 repressor. The expression vector also contains the P15a origin of replication and a chloramphenicol resistance gene. The resulting plasmids were transformed into E. coli W3110, using standard methods known in the art. The transformants were isolated by subjecting the cells to chloramphenicol selection, as known in the art (See e.g., U.S. Pat. No. 8,383,346 and WO2010/144103).

### Example 2

### Preparation of HTP KRED-Containing Wet Cell Pellets

[0063] E. coli cells containing recombinant KRED-encoding genes from monoclonal colonies were inoculated into 190 μl Luria-Bertani (LB) broth containing 1% glucose and 30 pg/mL chloramphenicol in the wells of 96-well shallow-well microtiter plates. The plates were sealed with 02-permeable seals, and cultures were grown overnight at 20° C., 200 rpm, and 85% humidity. Then, 20 μl of each of the cell cultures were transferred into the wells of 96-well deep-well plates containing 380 μL Terrific Broth (TB) and 30 μg/mL chloramphenicol (CAM). The deep-well plates were sealed with O₂-permeable seals and incubated at 0° C., 250 rpm, and 85% humidity until an OD₆₀₀ of 0.6-0.8 was reached. The cell cultures were then induced by addition of Isopropyl d-1-thiogalactopyranoside (IPTG) to a final concentration of 1 mM and incubated overnight under the same conditions as onginally used. The cells were then pelleted using centrifugation at 4° C. 4000 rpm for 10 min. The supernatants were discarded, and the pellets frozen at −80° C. prior to lysis.

### Example 3

### Preparation of HTP KRED-Containing Cell Lysates

[0064] First, the cell pellets that were produced as described in Example 2 were lysed by adding 150 μL lysis buffer containing 100 mM pH 8 triethanolamine*H₂SO₄ with 2 mM MgSO₄ or 100 mM pH 8 Potassium Phosphate with 2 mM MgSO₄, 1 g/L lysozyme, and 0.5 g/L polymixin B sulfate (PMBS). Then, the cell pellets were shaken at room temperature for 2 hours on a bench top shaker. The plates were centrifuged at 4000 rpm, for 15 minutes at 4° C. to remove cell debris. The supernatants were then used in biocatalytic reactions to determine their activity levels.

### Example 4

### Preparation of Lyophilized Lysates from Shake Flask (SF) Cultures

[0065] Shake-flask procedures can be used to generate engineered KRED polypeptide shake-flask powders (SFP), which are useful for secondary screening assays and/or use in the biocatalytic processes described herein. Shake flask powder (SFP) preparation of enzymes provides a more purified preparation (e.g., up to 30% of total protein) of the engineered enzyme, as compared to the cell lysate used in high throughput (HTP) assays and also allows for the use of more concentrated enzyme solutions. To start this, selected HTP cultures grown as described above were plated onto LB agar plates with 1% glucose and 30 μg/ml CAM, and grown overnight at 37° C. A single colony from each culture was transferred to 6 ml of LB with 1% glucose and 30 μg/ml CAM. The cultures were grown for 18 h at 30° C. at 250 rpm, and subcultured approximately 1:50 into 250 ml of TB containing 30 μg/mlCAM, to a final OD₆₀₀ of 0.05. The cultures were grown for approximately 3 hours at 30° C. at 250 rpm to an OD₆₀₀ between 0.8-1,0 and induced with 1 mM IPTG. The cultures were then grown for 20 h at 30° C. at 250 rpm. The cultures were centrifuged (4000 rpm for 20 min at 4° C.). The supernatant was discarded, and the pellets were re-suspended in 35 ml of 50 mM pH 8 Potassium Phosphate with 2 mM MgSO₄. The re-suspended cells were centrifuged (4000 rpm for 20 min at 4° C.). The supernatant was discarded, and the pellets were re-suspended in 6 ml of 50 mM pH 8 Potassium Phosphate with 2 mM MgSO₄, and the cells were lysed using a cell disruptor from Constant Systems (One Shot). The lysates were pelleted (10,000 rpm for 60 min at 4° C.), and the supernatants were frozen and lyophilized to generate shake flask (SF) enzymes.

### Example 5

### Screening of Commercially Available KRED Enzyme Panel

### KRED Screening Assay

[0066] A set of commercially available ketoreductases were tested for their ability to reduce isoalpha acids using the commercially available “KRED Screening Kits” (Codexis Inc., Redwood City, Calif.). For a portion of the enzymes in this screening, the enzyme assay was carried out in a 1.5 mL volume tubes, in 1000 μL total volume/tube, which included 10 g/L enzyme powder, 2.9 or 6.9 g/L isoalpha acids substrate, and 0.8 g/L NADP in 30 vol % isopropanol (IPA) in 128 mM pH 7 sodium phosphate with 1.7 mM MgSO₄. The tubes were closed and incubated at 30° C. with shaking at 180 rpm for 24-48 hours. The obtained reaction mixture was filtered to remove enzyme using a 10,000 MWCO centrifugal filtration device. Isoalpha acids and dihydro-(rho)-isoalpha acids were quantified by UPLC. See, for example, the chromatogram for Codexis KRED-433 presented in FIG. 4.

[0067] For the other portion of the enzymes in this screening, the enzyme assay was carried out in a 1.5 mL volume tubes, in 1000 μL total volume/tube, which included 10 g/L enzyme powder, 1.5 g/L isoalpha acids substrate, 0.8 g/L NADP, 0.7 g/L NAD, 14.4 g/L D-glucose, and 4.3 U/mL glucose dehydrogenase in 263 mM pH 7 sodium phosphate with 1.7 mM MgSO₄. The tubes were closed and incubated at 30° C. with shaking at 180 rpm for 24-48 hours. The obtained reaction mixture was filtered to remove enzyme using a 10,000 MWCO centrifugal filtration device. Isoalpha acids and dihydro-(rho)-isoalpha acids were quantified by UPLC.

### Ketoreductase Characterization Assay

[0068] Ketoreductases that produced detectable quantities of dihydro-(rho)-isoalpha acids were further characterized under various reaction conditions. For this purpose, the enzyme assays were carried out in 2.0 mL volume tubes, in 1000 total volume/tube, which included 10-20 giL enzyme powder, 15-6.0 get isoalpha acids substrate, 0.8 g/L NADP (optionally, 0.7 NAD, 14.4 g/L D-glucose, 4.3 U/mL glucose dehydrogenase or 30 vol% Isopropanol) in 100-263 mM pH 7-9 sodium phosphate (or alternatively, Tris HCl) with 1.7 mM MgSO₄. The tubes were closed and incubated at 30-40° C. with shaking at 180 rpm for 24-48 hours. The obtained reaction mixtures were filtered to remove enzyme. Isoalpha acids and dihydro-(rho)-isoalpha acids were detected by UPLC-MS/MS and HPLC.

### Results

### KRED Screening Results

[0069] Several commercially available enzymes from Codexis′ “KRED Screening Kits” are capable of reducing isoalpha acids (Table 1). The original kit was composed of 24 ketoreductases (referred to as KREDs) that have been selected (i.e. natural) or engineered for broad substrate range and enhanced activity by the manufacturer. An additional kit was composed of 7 engineered variants based on the backbone of KRED-130.

TABLE 1
Results from Commercially Available
KRED Enzyme Panel

| Ketoreductase Enzyme | Rho Detected?¹ |
|---|---|
| KRED-P1-A04 | − |
| KRED-P1-A12 | − |
| KRED-P1-B02 | − |
| KRED-P1-B05 | + |
| KRED-P1-B10 | − |
| KRED-P1-B12 | − |
| KRED-P1-C01 | − |
| KRED-P1-H08 | − |
| KRED-P2-B02 | + |
| KRED-P2-C02 | + |
| KRED-P2-C11 | + |
| KRED-P2-D03 | − |
| KRED-P2-D11 | + |
| KRED-P2-D12 | − |
| KRED-P2-G03 | + |
| KRED-P2-H07 | − |
| KRED-P3-B03 | − |
| KRED-P3-G09 | + |
| KRED-P3-H12 | − |
| KRED-101 | + |
| KRED-119 | + |
| KRED-130 | + |
| KRED-NADH-101 | − |
| KRED-NADH-110 | − |
| KRED-430 | + |
| KRED-431 | + |
| KRED-432 | + |
| KRED-433 | + |
| KRED-434 | + |
| KRED-435 | + |
| KRED-436 | + |

¹+ = Peaks corresponding to Dihydroisoalpha acids (Rho) observed via UPLC-MS after incubation with enzyme.

### Ketoreductase Characterization

[0070] Enzymes were determined to, reduce isoalpha acids if peaks corresponding to cis/trans- co/ad/n-dihydro-(rho)-isoalpha acid were detected via UPLC at a greater intensity than a control sample lacking enzyme,

[0071] KRED-P1-B05 (SEQ ID NO: 4) produced the most dihydro-(rho)-isoalpha acids in a 24 hour period by qualitative comparison of UPLC peak heights (See FIG. 2). KRED-P1-B05 (SEQ ID NO: 4) is derived from an enzyme encoded by a polynucleotide (SEQ ID NO: 1) which encodes an amino acid sequence which is a naturally-occurring, wild-type ketoreductase from Lactobacillus kefir (SEQ ID NO: 2). Dihydro-(rho)-isoalpha acids produced by this ketoreductase were present at high enough concentration to be quantified by HPLC. In 24 hour at 30° C. KRED-P1-B05 achieved a yield of 18% dihydro-(rho)-isoalpha acids. The reaction was duplicated with a 48 hour reaction duration, achieving a yield of 42% dihydro-(rho)-isoalpha acids. (See FIG. 3). When the reaction temperature was increased from 30° C. to 37° C. for 48 hours, the yield was 33%.

[0072] KRED-P1-B05 activity was initially tested using buffer (128 mM sodium phosphate pH 7 with 1.7 mM magnesium sulfate, 0.8 g/L mM NADP)) in addition to 30 vol % isopropanol for cofactor recycling. Multiple reaction conditions (temperature, duration, buffer composition, substrate concentration, etc.) were determined to be adequate for reduction of isoalpha acids,

### Substrate Specificity

[0073] The ideal ketoreductase for biotransformation purposes shows no substrate specificity for the isohumulone congeners which vary based on side chain composition (conferring n-, ad-, and co-isohumulone). Additionally, the ketoreductase shows no specificity for the isohumulone cis and trans isomers which vary spatially at the C4 tertiary alcohol group proximal to the site of enzymatic reduction. Substrate specificity is dictated by the amino acid sequence and thus the geometry of the substrate binding pocket of an enzyme. Larger binding pockets accommodate larger substrates, as well as a greater variety of substrates, compared to more restricted binding pockets.

[0074] Despite the presence of two additional ketone groups on the isoalpha acid molecule, only the desired reduction at the C4 side chain was observed for all characterized ketoreductases.

### Example 6

### Evolution and creeping of Engineered Polypeptides Derived frog SEQ D NO: 4 for Improved KRED Activity

[0075] The enzyme of SEQ ID NO: 4 was selected as the parent enzyme based on the results of screening variants for the reduction of the ene-acid substrate. Libraries of engineered genes were produced using well-established techniques (e,g,, saturation mutagenesis, and recombination of previously identified beneficial mutations). The polypeptides encoded by each gene were produced in HTP as described in Example 2, and the soluble lysate was generated as described in Example 3.

[0076] The engineered polynucleotide of SEQ ID NO: 3 which encodes SEQ ID NO: 4, exhibiting superior KRED activity, was used to generate the further engineered polypeptides of Table 2. These polypeptides displayed improved formation of dihydro-(rho)-isoalpha acids from isoalpha acids, as compared to the starting polypeptide. The engineered polypeptides were generated from the “backbone” amino acid sequence of SEQ ID NO: 4 using directed evolution methods as described above together with the HTP assay and analytical methods described below in Table 2.

TABLE 2
KRED Variant Activity Relative to SEQ ID NO: 4

| SEQ ID | |
|---|---|
| NO: | Percent Conversion Fold Improvement |
| (nt/aa) | (Relative to SEQ ID NO: 4)¹ |
| 5/6 | ++++ |
| 7/8 | +++ |
| 9/10 | +++ |
| 11/12 | +++ |
| 13/14 | ++ |
| 15/16 | ++ |
| 17/18 | ++ |
| 19/20 | ++ |
| 21/22 | ++ |
| 23/24 | + |
| 25/26 | + |
| 27/28 | + |
| 29/30 | + |
| 31/32 | + |
| 33/34 | + |
| 35/36 | + |
| 37/38 | + |
| 39/40 | + |
| 41/42 | + |
| 43/44 | + |
| 45/46 | + |
| 47/48 | + |
| 49/50 | + |
| 51/52 | + |
| 53/54 | + |
| 55/56 | + |
| 57/58 | + |
| 59/60 | + |
| 61/62 | + |
| 63/64 | + |
| 65/66 | + |
| 67/68 | + |
| 69/70 | + |

¹Levels of increased activity were determined relative to the reference polypeptide of SEQ ID NO: 4 and defined as follows: “+” >1.0 but <2.0, “++” ≥2 but ≤4, “+++” ≥4 but ≤8, “++++” ≥ 8

[0077] Directed evolution began with the polynucleotide set forth in SEQ ID NO. 3. Engineered polypeptides were then selected as starting “backbone” gene sequences. Libraries of engineered polypeptides were generated using various well-known techniques (e.g., saturation mutagenesis, recombination of previously identified beneficial amino acid differences) and screened using HIP assay and analysis methods that measured the polypeptides ability to convert the isoaipha acids substrates to the desired dihydro-(rho)-isoalpha acids products.

[0078] The enzyme assay was carried out in a96-well format, in 200 μL total volume/well, which included 50% v/v HTP enzyme lysate, 8 g/L isoalpha acids substrate, and 0.1 g/L NADP in 40 vol% isopropanol (IPA) in 100 mM pH 8 triethanolamine*H₂SO₄ with 2 mM MgSO₄. The plates were sealed and incubated at 40° C. with shaking at 600 rpm for 20-24 hours.

[0079] After 20-24 hours, 1000 μL of acetonitrile with 0.1% acetic add was added. The plates were sealed and centrifuged at 4000 rpm at 4° C. for 10 min. The quenched sample was further diluted 4-5× in 50:50 acetonitrile:water mixture prior o HPLC analysis. Thee HPLC run parameters are described below in Table 3.

TABLE 3
HPLC Parameters

| Instrument | Agilent 1100 HPLC | | |
|---|---|---|---|
| Column | 30 × 50 mm 2.7 μm Waters XBridge Phenyl column | | |
| Mobile Phase | A: 0.1% acetic acid in water, B: 0.1% acetic acid in acetonitrile | | |
| Run | 42:58 A/B for 1 minute; ramp to 10:90 A/B over 1 minute | | |
| parameters | | | |
| Flow Rate | 1.5 mL/min | | |
| Run time | 2.0 min | | |
| | | retention | |
| | | time | |
| | Compound | [min] | note |
| Peak | Iso-1 | 0.6 | mixture of co-Iso isomers |
| Retention | Iso-2 | 0.7 | mixture of n/ad-Iso isomers |
| Times | Iso-3 | 0.8 | mixture of n/ad-Iso isomers |
| | Rho-1 | 1.0 | mixture of co-Rho isomers |
| | Rho-2 | 1.2 | mixture of n/ad-Rho isomers |
| | Rho-3 | 1.4 | mixture of n/ad-Rho isomers |

| | |
|---|---|
| Column | 50° C. |
| Temperature | |
| Injection | 10 uL |
| Volume | |
| Detection | 260 nm |

### Example 7

### Evolution and Screening of Engineered Polypeptides Derived from SEQ ID 6 for Improved KRED Activity

[0080] Libraries of engineered genes were produced using well-established techniques (e.g., saturation mutagenesis, and recombination of previously identified beneficial mutations). The polypeptides encoded by each gene were produced in HTP as described in Example 2, and the soluble lysate was generated as described in Example 3.

[0081] The engineered polynucleotide of SEQ ID NO: 5, which encodes the polypeptide of SEQ ID NO: 6, exhibiting superior KRED activity, was used to generate the further engineered polypeptides of Table 4. These polypeptides displayed improved formation of dihydro-(rho)-isoalpha acid from isoaipha acids as compared to the starting polypeptide. The engineered polypeptides were generated from the “backbone” amino acid sequence of SEQ ID NO: 6 using directed evolution methods as described above together with the HIP assay and analytical methods described in Table 3.

TABLE 4
KRED Variant Activity Relative to SEQ ID NO: 6

| SEQ ID | |
|---|---|
| NO: | Percent Conversion Fold Improvement |
| (nt/aa) | (Relative to SEQ ID NO: 6)¹ |
| 71/72 | ++++ |
| 73/74 | +++ |
| 75/76 | +++ |
| 77/78 | +++ |
| 79/80 | +++ |
| 81/82 | ++ |
| 83/84 | ++ |
| 85/86 | + |
| 87/88 | + |
| 89/90 | + |
| 91/92 | + |
| 93/94 | + |
| 95/96 | + |
| 97/98 | + |

¹Levels of increased activity were determined relative to the reference polypeptide of SEQ ID NO: 6 and defined as follows: “+” >1.0 but <2.0, “++” ≥2 but ≤4, “+++” ≥4 but ≤8, “++++” ≥8

[0082] Directed evolution began with the polynucleotide set forth in SEQ ID NO: 5. Engineered polypeptides were then selected as starting “backbone” gene sequences. Libraries of engineered polypeptides were generated using various well-known techniques (e.g., saturation mutagenesis, recombination of previously identified beneficial amino acid differences) and screened using HTP assay and analysis methods that measured the polypeptides ability to convert the isoalpha acid substrates to the desired dihydro-(rho)-isoalpha acid products.

[0083] The enzyme assay was carried out in a 96-well format, in 200 μL total volume/well, which included 50% v/v HTP enzyme lysate, 16 or 40 g/L of isoalpha acids substrate, and 0.1 g/L NADP in 40 vol% isopropanol (IPA) in 100 mM pH 8 triethanolamine*H₂SO₄ with 2 mM MgSO₄. The plates were sealed and incubated at 40° C. with shaking at 600 rpm for 20-24 hours,

[0084] After 20-24 hours, 1000 μL of acetonitrile with 0.1% acetic acid was added. The plates were sealed and centrifuged at 4000 rpm at 4° C. for 10 min. The quenched sample was further diluted 10-20× in 50:50 acetonitrile:water mixture prior to HPLC analysis. The HPLC run parameters are described in Table 3.

### Example 8

### Evolution and Screening of Engineered Polypeptides Derived from SEQ ID NO: 80 for Improved KRED Activity

[0085] Libraries of engineered genes were produced using well-established techniques (e.g. saturation mutagenesis, and recombination, of previously identified beneficial mutations). The polypeptides encoded by each gene were produced in HTP as described in Example 2, and the soluble lysate was generated as described in Example 3.

[0086] The engineered polynucleotide of SEQ ID NO: 79, which encodes the polypeptide of SEQ ID NO: 80, exhibiting superior KRED activity, was used to generate the further engineered polypeptides of Table 5. These polypeptides displayed improved formation of dihydro-(rho)-isoalpha acids from isoalpha acids as compared to the starting polypeptide. The engineered polypeptides were generated from the ‘backbone’ amino acid sequence of SEQ ID NO: 80 using directed evolution methods as described above together with the HTP assay and analytical methods described below in Table 3.

TABLE 5
KRED Variant Activity Relative to SEQ ID NO: 80

| SEQ ID | |
|---|---|
| NO: | Percent Conversion Fold Improvement |
| (nt/aa) | (Relative to SEQ ID NO: 80)¹ |
| 99/100 | ++++ |
| 101/102 | ++++ |
| 103/104 | +++ |
| 105/106 | +++ |
| 107/108 | +++ |
| 109/110 | +++ |
| 111/112 | +++ |
| 113/114 | ++ |
| 115/116 | ++ |
| 117/118 | ++ |
| 119/120 | ++ |
| 121/122 | ++ |
| 123/124 | ++ |
| 125/126 | ++ |
| 127/128 | ++ |
| 129/130 | + |
| 131/132 | + |
| 133/134 | + |
| 135/136 | + |
| 137/138 | + |
| 139/140 | + |
| 141/142 | + |

[0087] Directed evolution began with the polynucleotide set forth in SEES ID NO: 79. Engineered polypeptides were then selected as starting “backbone” gene sequences. Libraries of engineered polypeptides were generated using various well-known techniques (e.g., saturation mutagenesis, recombination of previously identified beneficial amino acid differences) and screened using HTP assay and analysis methods that measured the polypeptides ability to convert the isoalpha acid substrates to the desired dihydro-(rho)-isoalpha acid products.

[0088] The enzyme assay was carried out in a 96-well format, in 200 μL total volume/well, which included 25% v/v HTP enzyme lysate, 60 or 80 g/L of isoalpha acid substrate, and 0.02 g/L NADP in 40 vol % isopropanol (IPA) in 100 mM pH 8 potassium phosphate with 2 mM MgSO₄. The plates were sealed and incubated at 45° C. with shaking at 800 rpm for 20-24 hours.

[0089] After 20-24 hours, 1000 μL of acetonitrile with 0.1 acetic acid was added. The plates were sealed and centrifuged at 4000 rpm at4′C for 10 min. The quenched sample was further diluted 20-40× in 50:50 acetonitrile:water mixture prior to HPLC analysis. The HPLC run parameters are described in Table 3.

### Example 9

### Evolution and Screening of Engineered Poly -eptides Derived from SEQ ID NO: 80 for Improved KRED Activity at High Substrate Concentration

[0090] Libraries of engineered genes were produced using well-established techniques (e.g., saturation mutagenesis, and recombination of previously identified beneficial mutations). The polypeptides encoded by each gene were produced in HTP as described in Example 2, and the soluble lysate was generated as described in Example 3.

[0091] The engineered polynucleotide of SEQ ID NO: 79, which encodes the polypeptide of SEQ ID NO: 80, exhibiting superior KRED activity, was used to generate the further engineered polypeptides of Table 6. These polypeptides displayed improved formation of dihydro-(rho)-isoalpha acids from isoalpha acids as compared to the starting polypeptide. The engineered polypeptides were generated from the “backbone” amino acid sequence of SEQ ID NO: 80 using directed evolution methods as described above and are described below in Table 3.

TABLE 6
KRED Variant Activity Relative to SEQ ID NO: 80

| SEQ ID | |
|---|---|
| NO: | Percent Conversion Fold Improvement |
| (nt/aa) | (Relative to SEQ ID NO: 80)¹ |
| 143/144 | ++++ |
| 145/146 | ++++ |
| 147/148 | ++++ |
| 149/150 | ++++ |
| 99/100 | ++++ |
| 151/152 | +++ |
| 153/154 | +++ |
| 155/156 | +++ |
| 103/104 | ++ |
| 157/158 | ++ |
| 159/160 | ++ |
| 139/140 | + |
| 161/162 | + |

[0092] Directed evolution began with the polynucleotide set forth in SEQ ID NO: 79. Engineered polypeptides were then selected as starting “backbone” gene sequences. Libraries of engineered polypeptides were generated using various well-known techniques (e.g., saturation mutagenesis, recombination of previously identified beneficial amino acid differences) and screened using HIP assay and analysis methods that measured the polypeptides ability to convert the isoalpha acid substrates to the desired dihydro-(rho)-isoalpha acid products.

[0093] The enzyme assay was carried out in a 96-well format, in 200 μL total volume/well, which included 10-20% v/v HIP enzyme lysate, 80 or 160 g/L of isoalpha acid substrate, and 0.02 g/L NADP in 40 vol % isopropanol (IPA) in 100 mM pH 8 potassium phosphate with 2 mM MgSO₄. The plates were sealed and incubated at 45° C. with shaking at 600 rpm for 20-24 hours.

[0094] After 20-24 hours, 1000 μL of acetonitrile with 0.1% acetic acid was added. The plates were sealed and centrifuged at 4000 rpm at 4′C for 10 min. The quenched sample was further diluted 20-40× in 50:50 acetonitrile:water mixture prior to HPLC analysis. The HPLC run parameters are described in Table 3.

### Example 10

### Evolution and Screening of Engineered Polypeptides Derived from SEQ ID NO: 80, 104, 100, 136, 116, 132, 162, 150, 162, 144 and 146 for Improved KRED Activity at High Substrate and Low NADP Concentration

[0095] A 200 g/L enzyme stock solution was prepared by dissolving 100 mg of enzyme powder in 500 μL of 100 mM pH 8 potassium phosphate buffer with 2 mM MgSO₄ and 0.1 g/L of NADP. To a well in a 96 deep-well plate was added 40 μL of the enzyme/NADP stock solution, 80 μL of isopropanol, and 80 μL of 40 wt % aqueous solution of isoalpha acid. The final reaction composition was 40 g/L of enzyme. 160 g/L isoalpha acid, and 0.02 g/L NADP in 40% IPA. The plate was sealed and incubated 40° C. for 24 h and then quenched and analyzed by HPLC-UV. The data are shown in Table 7 and FIG. 5.

TABLE 7
KRED Activity at High Substrate and Low NADPH Concentration

| SEQ ID NO: | % Conversion | | | | | |
|---|---|---|---|---|---|---|
| (nt/aa) | 40 g/L | 20 g/L | 10 g/L | 5 g/L | 2.5 g/L | 1.25 g/L |
| 79/80 | 4.2 | 1.9 | 0.9 | 0.5 | 0.1 | 0.0 |
| 103/104 | 28.2 | 16.5 | 8.7 | 5.2 | 2.2 | 1.2 |
| 99/100 | 23.1 | 11.2 | 6.1 | 3.3 | 1.3 | 0.6 |
| 135/136 | 23.6 | 7.5 | 2.4 | 1.2 | 0.6 | 0.0 |
| 115/116 | 8.5 | 3.2 | 1.2 | 0.7 | 0.2 | 0.0 |
| 131/132 | 5.3 | 2.2 | 0.8 | 0.4 | 0.1 | 0.0 |
| 161/162 | 29.1 | 14.4 | 5.6 | 2.1 | 0.7 | 0.3 |
| 149/150 | 29.0 | 14.9 | 6.0 | 2.4 | 1.0 | 0.2 |
| 151/152 | 30.6 | 17.9 | 7.4 | 3.6 | 2.0 | 1.2 |
| 143/144 | 29.1 | 14.4 | 5.8 | 2.4 | 1.2 | 0.4 |
| 145/146 | 24.3 | 12.3 | 4.7 | 1.9 | 0.8 | 0.1 |
| 157/158 | 3.0 | 1.1 | 0.4 | 0.0 | 0.0 | 0.0 |

### Example 11

### Enzyme Treatment of Acidified Hop Derived Isoalpha Acids with Cofactor Recycling by Isopropanol Oxidation

[0096] Isoalpha acids are treated in a manner described in Example 10, where the source of isoalpha acids is a highly concentrated material (68.9% isoalpha acids) having a pH<7.

### Example 12

### Enzyme Treatment of Hop Derived Isoalpha Acids with Cofactor Recycling by Glucose Dehydrogenase

[0097] Isoalpha acids are treated in a manner described in Example 10, with the exception that isopropanol is replaced with 4.3 U/mL Glucose Dehydrogenase, 0.7 g/L mM NAD, and 14.4 g/L D-glucose.

### Example 13

### Enzyme Treatment of Hop Derived isoalpha Acids without Cofactor Recycling

[0098] Isoalpha acids are treated in a manner described in Example 10, with the exception that isopropanol is replaced with an equimolar amount of NADPH as substrate.

### Example 14

### Enzyme Treatment of Hop Derived Isoalpha Acids with Cofactor Recycling by Ethanol Oxidation

[0099] Isoalpha acids are treated in a manner described in Example 10, with the exception that isopropanol is replaced with ethanol.

### Example 16

### Enzyme Treatmentof Hop Derived Isoalpha Acids with Immobilized Ketoreductase via SiO₂

[0100] A ketoreductase is adsorbed on SiO₂ and crosslinked with glutaraldehyde to yield an immobilized ketoreductase material. Isoalpha acids are treated with the immobilized ketoreductase in a manner described in Example 10. The obtained reaction mixture is centrifuged at 10,000 g to remove immobilized enzyme.

### Example 16

### Enzyme Treatment of Hop Derived isoalpha Acids with Immobilized Ketoreductase via DEAE-Cellulose

[0101] A ketoreductase is crosslinked with glutaraldehyde and adsorbed onto DEAE-cellulose to yield an immobilized ketoreductase material. Isoalpha acids are treated with the immobilized ketoreductase in a manner described in Example 10. The obtained reaction mixture is centrifuged at 10,000g to remove immobilized enzyme.

### Example 17

### Enzyme Treatmentof Hop Derived Isoalpha Acids with Immobilized Ketoreductase via PEI-Treated Alumina

[0102] A ketoreductase is crosslinked with glutaraldehyde and adsorbed onto polyethylimine (PEI)-treated alumina to yield an immobilized ketoreductase material. Isoalpha acids are treated with the immobilized ketoreductase in a manner described in Example 10. The obtained reaction mixture is centrifuged at 10,000 g to remove immobilized enzyme.

### Example 18

### Enzyme Treatment of Hop Derived Isoalpha Acids with NADH Cofactor Recycling

[0103] Enzyme treatment where the NADPH cofactor is substituted with NADH. Isoalpha acids are treated in a manner described in Example 10 but the NADP is replaced with NAD.

### Example 19

### Enzyme Treatment of Hop Derived Isoalpha Acids Followed by Extraction

[0104] Enzyme treatment followed by extraction to increase final concentration of dihydro-(rho)-isoalpha acids is performed. Isoalpha acids are treated in a manner described in Example 10. The obtained reaction mixture is filtered to remove enzyme and extracted with food-grade solvent to achieve a desired concentration of dihydro-(rho)-isoalpha acids.

### Example 20

### Enzyme Treatment of Hop Derived Isoalpha Acids Followed by Thermal Inactivation

[0105] Isoalpha acids are treated in a manner described in Example 10. The reaction is incubated at 30° C. with orbital shaking at 180 rpm for 24 hours. The obtained reaction mixture is heated at 80-100° C. for 10-30 minutes to inactivate enzyme.

### Example 21

### Enzyme Treatment of Hop Derived Isoalpha Acids Followed by Chemical Inactivation

[0106] Isoalpha acids are treated in a manner described in Example 10. The reaction is incubated at 30° C. with orbital shaking at 180 rpm for 24 hours. Food-grade ethanol is added to a final concentration of >50% to inactivate enzyme.

### Example 22

### Enzyme Treatment of Hop Derived Isoalpha Acids with Immobilized Ketoreductase Recycling

[0107] A ketoreductase is crosslinked with glutaraldehyde and adsorbed onto DEAE-celiulose to yield an immobilized ketoreductase material. Isoalpha acids are then treated with the immobilized ketoreductase in a manner described in Example 10. The obtained reaction mixture is centrifuged at 10,000 g to separate immobilized ketoreductase from the reaction solution. Immobilized ketoreductase is recovered, washed with water or aqueous buffer, and re-used in a new reaction mixture.

### Example 23

### Isoaipha Acids Reduction using Engineered Polypeptides Derived from SEQ ID NO: 80, 104, 172, 186, 194, 196, 252, 270, 272, 286, 300, 328, 330, and 346 at High Substrate and Low NADP Concentration

[0108] Libraries of engineered genes were produced using well-established technique (e.g., saturation mutagenesis, and recombination of previously identified beneficial mutations). The polypeptides encoded by each gene were produced in HTP as described in Example 2, and the soluble lysate was generated as described in Example 3e.

[0109] The engineered polynucleotide of SEQ ID NO: 103, which encodes the polypeptide of SEQ ID NO: 104, exhibiting superior KRED activity, was used to generate the further engineered polypeptides of Table 8. These polypeptides displayed improved formation of dihydro-(rho)-isoalpha acid from isoalpha acids as compared to the starting polypeptide. The engineered polypeptides were generated from the “backbone” amino acid sequence of SEQ ID NO: 104 using directed evolution methods as described above together with the HTP assay and analytical methods described in Table 3.

[0110] The following procedure can use any of the improved variants (SEQ. ID NO: 6, SEQ ID NO: 80, SEQ ID NO: 104, SEQ ID NO: 172, SEQ ID NO: 186, SEQ ID NO: 194, SEQ ID NO: 196, SEQ ID NO: 252, SEQ ID NO: 270, SEQ ID NO: 272, SEQ ID NO: 286, SEQ ID NO: 300, SEQ ID NO: 328, SEQ ID NO: 330, SEQ ID NO: 346, SEQ ID NO: 348, and SEQ ID NO: 356) for production of enzymatically reduced isoalpha acids at commercially viable isoalpha acids concentrations (volumetric productivity) and % conversion (yield). The reaction is performed in a glass vessel, temperature controlled, with mixing. The data are shown in Table 8 and FIG. 6.

[0111] Reagents
[0112] a. Isoalpha acids:
   [0113] i. Loading is (up to) 160 g/L 46.000.318; Lot 101403
   [0114] ii. Isoalpha is in the base form (38% by HPLC):
   [0115] iii. Use 4210.5 grams
[0116] b. Isopropanol (40% by volume)
[0117] c. RO water
[0118] d. KRED Enzyme (loading is 10 g/L): 100 grams
[0119] e. NADP (loading is 0.125 g/L): 1.25 grams
[0120] f. Magnesium sulfate heptahydrate (91.615, 1 mM in solution; 0.246 g/L; MW=246.4 g/mole): use 2.46 grams
[0121] g. 15% potassium hydroxide (15% KOH)

[0122] Procedure
[0123] a. Measure out h 40% by volume of water
[0124] b. Measure out the 40% by volume of isopropanol
[0125] c. Prepare Isoalpha acid solution by adding 15% KOH to pH 8.5 (+/−0.5)
[0126] d. Prepare a 10% “solution” of enzyme-NADP-magnesium sulfate heptahydrate in water
[0127] e. Add enzyme solution to Isoalpha acid to start reaction.
[0128] f. Heat reaction to 40° C.
[0129] g. Purge vessel with nitrogen.
[0130] h. Reaction is sampled and pH is recorded at time 0, 24 and 48 hours.

TABLE 8
KRED Variant Activity Relative to SEQ ID NO: 104

| SEQ ID | |
|---|---|
| NO: | Percent Conversion Fold Improvement |
| (nt/aa) | (Relative to SEQ ID NO: 104)¹ |
| 355/356 | ++++ |
| 329/330 | ++++ |
| 327/328 | ++++ |
| 285/286 | ++++ |
| 271/272 | +++ |
| 2691270 | +++ |
| 251/252 | +++ |
| 193/194 | +++ |
| 185/186 | ++ |
| 171/172 | + |

¹Levels of increased activity were determined relative to the reference polypeptide of SEQ ID NO: 104 and defined as follows: “+” >1.0 but <10.0, “++” ≥10 but ≤20, “+++” ≥20 but ≤50, “++++” ≥50

### Conclusions

[0131] 412 ketoreductases have been characterized as transforming isoalpha acids into dihydro-(rho)-isoalpha acids. The ketoreductases characterized in this study possess an enzymatic activity that has not been described previously The ketoreductases characterized in this study all reduce a ketone group into an alcohol and are thus ketoreductases. These results demonstrate that a ketoreductase biocatalyst may be employed to convert isoalpha acids to dihydro-(rho)-isoalpha acids in a novel biotransformation process The present invention is intended to replace current processes utilizing sodium borohydride.

[0132] The present invention is not, to be limited in scope by the specific embodiments described herein. Indeed, various modifications of the invention in addition to those described herein will become apparent to those skilled in the art from the foregoing description. Such modifications are intended to fall within the scope of the appended claims.

[0133] All patents, applications, publications, test methods, literature, and other materials cited herein are hereby incorporated by reference.

### CITED REFERENCES

[0134] 1. Sodium Borohydride; MSDS No. S9125: Sigma-Aldrich Co.: Saint Louis, Mo. Nov. 1, 2015. (accessed Jun. 8, 2017),
[0135] 2. Robinson, P. K., Enzymes: principles and biotechnological applications. Essays Biochem 2015, 59, 1-41.
[0136] 3. Hult, K.; Berglund, P., Enzyme promiscuity: mechanism and applications. Trends Biotechnol. 2007, 25 (5), 231-238.
[0137] 4. Nobeli, I.; Favia, A. D.; Thornton, J. M., Protein promiscuity and its implications for biotechnology. Nat. Biotechnol. 2009, 27 (2)157-167
[0138] 5. Pozen, M., Enzymes in Brewing. Ind. Eng. Chem, 1934, 26 (11), 1127-1133.
[0139] 6. Praet, T.; Opstaele, F.; Jaskula-Goiris, B.; Aerts, G.; De Cooman, L., Biotransformations of hop-derived aroma compounds by Saccharomyces cereviisae upon fennentation Cerevisia, 2012, 36, 125-132.
[0140] 7. Wallerstein, L. (1947) Bentonite and Proteolytic Enzyme Treatment of Beer, U.S. Pat. No. 2,433,411.
[0141] 8. Ghionno, L.; Marconi, O.; Sileoni, V.; De Francesco, G.; Perretti, G., Brewing with prolyl endopeptidase from Aspergillus niger, the impact of enzymatic treatment on gluten levels, quality attributes, and sensory profile. Int. J. Food Sci. Technol, 2017, 52 (6), 1367-1374.
[0142] 9. Gros, J.; Tran, T. T. H.; Collin, S., Enzymatic release of odourant polyfunctional thiols from cysteine conjugates in hop. J. Inst. Brew. 2013, 119 (4), 221-227.

The application's sequence listing, which the Patent Office published only in electronic form, follows.

SEQUENCE LISTING (412 sequences)

SEQ ID NO: 1 - DNA, 759 bp, Artificial Sequence
  Wild-Type Kred from Lactobacillus kefir
atgaccgatcgtctgaagggcaaagtagccatcgtaaccggcgggactctgggtatcggtttggcaatcgccgataaatttgtagaggagggtgcgaaagtagttattactggtcgtcacgcggatgtaggtgaaaaggccgccaaatcaatcggcggcactgatgttattcgctttgtccagcacgatgcatccgatgaagcaggctggacgaaactgttcgacaccaccgaggaggcattcggcccggttacgaccgtcgtgaacaatgcagggattgcagtttccaaaagcgttgaagacactaccacggaggaatggcgtaaactgctgtccgttaatctggatggtgtttttttcggcacccgtctgggcattcagcgcatgaaaaataaaggcttgggcgctagcatcatcaatatgagcagtattgaggggttcgtaggcgatccgacgctgggggcatacaacgcttccaagggggcggtacgtatcatgtcgaaaagcgcagcgctggattgcgcactgaaggactacgatgtgcgtgtcaacacagtacatccgggctatatcaagaccccgctggtcgatgatctggaaggtgctgaggaaatgatgtcacagcgtacgaaaacccctatgggccacattggcgaaccgaatgacatcgcatggatctgtgtgtacctggcatctgacgaatcgaaatttgcgacgggtgcagaatttgtggtcgacggcgggtataccgcacagtga

SEQ ID NO: 2 - protein, 252 aa, Artificial Sequence
  Wild Type Kred from Lactobacillus kefir
MTDRLKGKVAIVTGGTLGIGLAIADKFVEEGAKVVITGRHADVGEKAAKSIGGTDVIRFVQHDASDEAGWTKLFDTTEEAFGPVTTVVNNAGIAVSKSVEDTTTEEWRKLLSVNLDGVFFGTRLGIQRMKNKGLGASIINMSSIEGFVGDPTLGAYNASKGAVRIMSKSAALDCALKDYDVRVNTVHPGYIKTPLVDDLEGAEEMMSQRTKTPMGHIGEPNDIAWICVYLASDESKFATGAEFVVDGGYTAQ

SEQ ID NO: 3 - DNA, 759 bp, Artificial Sequence
  Engineered Variant of Kred from Lactobacillus kefir
atgaccgatcgtctgaagcataaagtagccatcgtaaccggcgggacactgggtatcggtttggcaatcgccgataaatttgtagaggagggtgcgaaagtagttattactggtcgtcacgcggatgtaggtgaaaaggccgccaaatcaatcggcggcactgatgttattcgctttgtccagcacgatgcgtccgaagaagcaggctggacgaaactgttcgacaccaccgaggaggcattcggcccggttacgaccgtcgtgaacaatgcagggattggggttattaaaagcgttgaagacactaccacggaggaatggcgtaaactgctgtccgttaatctggatggtgtttttttcggcacccgtctgggcattcagcgcatgaaaaataaaggcttgggcgctagcatcatcaatatgagcagtattctggggctcgtaggcgatccgacgctgggggcatacaacgcttccaagggggcggtacgtatcatgtcgaaaagcgcagcgctggattgcgcactgaaggactacgatgtgcgtgtcaacacagtacatccgggccccatcaagaccccgcggctcgatgatctggaaggttgggaggaaatgatgtcacagcgtacgttaacccctatgggccacattggcgaaccgaatgacatcgcatggatctgtgtgtacctggcatctgacgaatcgaaatttgcgacgggtgcagaatttgtggtcgacggcgggtggaccgcacagtga

SEQ ID NO: 4 - protein, 252 aa, Artificial Sequence
  Engineered Variant of Kred from Lactobacillus kefir
MTDRLKHKVAIVTGGTLGIGLAIADKFVEEGAKVVITGRHADVGEKAAKSIGGTDVIRFVQHDASEEAGWTKLFDTTEEAFGPVTTVVNNAGIGVIKSVEDTTTEEWRKLLSVNLDGVFFGTRLGIQRMKNKGLGASIINMSSILGLVGDPTLGAYNASKGAVRIMSKSAALDCALKDYDVRVNTVHPGPIKTPRLDDLEGWEEMMSQRTLTPMGHIGEPNDIAWICVYLASDESKFATGAEFVVDGGWTAQ

SEQ ID NO: 5 - DNA, 756 bp, Artificial Sequence
  Engineered Variant of Kred from Lactobacillus kefir
atgaccgatcgtctgaagcataaagtagccatcgtaaccggcgggacactgggtatcggtttggcaatcgccgataaatttgtagaggagggtgcgaaagtagttattactggtcgtcacgcggatgtaggtgaaaaggccgccaaatcaatcggcggcactgatgttattcgctttgtccagcacgatgcgtccgaagaagcaggctggacgaaactgttcgacaccaccgaggaggcattcggcccggttacgaccgtcgtgaacaatgcagggattggggttattaaaagcgttgaagacactaccacggaggaatggcgtaaactgctgtccgttaatctggatggtgtttttttcggcacccgtctgggcattcagcgcatgaaaaataaaggcttgggcgctagcatcatcaatatgagcagtattctggggctcgtaggcgatccgacgctgggggcatacaacgcttccaagggggcggtacgtatcatgtcgaaaagcgcagcgctggattgcgcactgaaggactacgatgtgcgtgtcaacacagtacatccgggccccatcaagaccccgcggaaggatgatctggaaggttgggaggaaatgatgtcacagcgtacgttaacccctatgggccacattggcgaaccgaatgacatcgcatggatctgtgtgtacctggcatctgacgaatcgaaatttgcgacgggtgcagaatttgtggtcgacggcgggtggaccgcacag

SEQ ID NO: 6 - protein, 252 aa, Artificial Sequence
  Engineered Variant of Kred from Lactobacillus kefir
MTDRLKHKVAIVTGGTLGIGLAIADKFVEEGAKVVITGRHADVGEKAAKSIGGTDVIRFVQHDASEEAGWTKLFDTTEEAFGPVTTVVNNAGIGVIKSVEDTTTEEWRKLLSVNLDGVFFGTRLGIQRMKNKGLGASIINMSSILGLVGDPTLGAYNASKGAVRIMSKSAALDCALKDYDVRVNTVHPGPIKTPRKDDLEGWEEMMSQRTLTPMGHIGEPNDIAWICVYLASDESKFATGAEFVVDGGWTAQ

SEQ ID NO: 7 - DNA, 756 bp, Artificial Sequence
  Engineered Variant of Kred from Lactobacillus kefir
atgaccgatcgtctgaagcataaagtagccatcgtaaccggcgggacactgggtatcggtttggcaatcgccgataaatttgtagaggagggtgcgaaagtagttattactggtcgtcacgcggatgtaggtgaaaaggccgccaaatcaatcggcggcactgatgttattcgctttgtccagcacgatgcgtccgaagaagcaggctggacgaaactgttcgacaccaccgaggaggcattcggcccggttacgaccgtcgtgaacaatgcagggattggggttattaaaagcgttgaagacactaccacggaggaatggcgtaaactgctgtccgttaatctggatggtgtttttttcggcacccgtctgggcattcagcgcatgaaaaataaaggcttgggcgctagcatcatcaatatgagcagtattctggggctcgtaggcgatccgacgctgggggcatacaacgcttccaagggggcggtacgtatcatgtcgaaaagcgcagcgctggattgcgcactgaaggactacgatgtgcgtgtcaacacagtacatccgggccccatcaagaccccgcggagggatgatctggaaggttgggaggaaatgatgtcacagcgtacgttaacccctatgggccacattggcgaaccgaatgacatcgcatggatctgtgtgtacctggcatctgacgaatcgaaatttgcgacgggtgcagaatttgtggtcgacggcgggtggaccgcacag

SEQ ID NO: 8 - protein, 252 aa, Artificial Sequence
  Engineered Variant of Kred from Lactobacillus kefir
MTDRLKHKVAIVTGGTLGIGLAIADKFVEEGAKVVITGRHADVGEKAAKSIGGTDVIRFVQHDASEEAGWTKLFDTTEEAFGPVTTVVNNAGIGVIKSVEDTTTEEWRKLLSVNLDGVFFGTRLGIQRMKNKGLGASIINMSSILGLVGDPTLGAYNASKGAVRIMSKSAALDCALKDYDVRVNTVHPGPIKTPRRDDLEGWEEMMSQRTLTPMGHIGEPNDIAWICVYLASDESKFATGAEFVVDGGWTAQ

SEQ ID NO: 9 - DNA, 756 bp, Artificial Sequence
  Engineered Variant of Kred from Lactobacillus kefir
atgaccgatcgtctgaagcataaagtagccatcgtaaccggcgggacactgggtatcggtttggcaatcgccgataaatttgtagaggagggtgcgaaagtagttattactggtcgtcacgcggatgtaggtgaaaaggccgccaaatcaatcggcggcactgatgttattcgctttgtccagcacgatgcgtccgaagaagcaggctggacgaaactgttcgacaccaccgaggaggcattcggcccggttacgaccgtcgtgaacaatgcagggattggggttattaaaagcgttgaagacactaccacggaggaatggcgtaaactgctgtccgttaatctggatggtgtttttttcggcacccgtctgggcattcagcgcatgaaaaataaaggcttgggcgctagcatcatcaatatgagcagtattctggggctcgtaggcgatccgacgaggggggcatacaacgcttccaagggggcggtacgtatcatgtcgaaaagcgcagcgctggattgcgcactgaaggactacgatgtgcgtgtcaacacagtacatccgggccccatcaagaccccgcggctcgatgatctggaaggttgggaggaaatgatgtcacagcgtacgttaacccctatgggccacattggcgaaccgaatgacatcgcatggatctgtgtgtacctggcatctgacgaatcgaaatttgcgacgggtgcagaatttgtggtcgacggcgggtggaccgcacag

SEQ ID NO: 10 - protein, 252 aa, Artificial Sequence
  Engineered Variant of Kred from Lactobacillus kefir
MTDRLKHKVAIVTGGTLGIGLAIADKFVEEGAKVVITGRHADVGEKAAKSIGGTDVIRFVQHDASEEAGWTKLFDTTEEAFGPVTTVVNNAGIGVIKSVEDTTTEEWRKLLSVNLDGVFFGTRLGIQRMKNKGLGASIINMSSILGLVGDPTRGAYNASKGAVRIMSKSAALDCALKDYDVRVNTVHPGPIKTPRLDDLEGWEEMMSQRTLTPMGHIGEPNDIAWICVYLASDESKFATGAEFVVDGGWTAQ

SEQ ID NO: 11 - DNA, 756 bp, Artificial Sequence
  Engineered Variant of Kred from Lactobacillus kefir
atgaccgatcgtctgaagcataaagtagccatcgtaaccggcgggacactgggtatcggtttggcaatcgccgataaatttgtagaggagggtgcgaaagtagttattactggtcgtcacgcggatgtaggtgaaaaggccgccaaatcaatcggcggcactgatgttattcgctttgtccagcacgatgcgtccgaagaagcaggctggacgaaactgttcgacaccaccgaggaggcattcggcccggttacgaccgtcgtgaacaatgcagggattggggttattaaaagcgttgaagacactaccacggaggaatggcgtaaactgctgtccgttaatctggatggtgtttttttcggcacccgtctgggcattcagcgcatgaaaaataaaggcttgggcgctagcatcatcaatatgagcagtatttctgggctcgtaggcgatccgacgctgggggcatacaacgcttccaagggggcggtacgtatcatgtcgaaaagcgcagcgctggattgcgcactgaaggactacgatgtgcgtgtcaacacagtacatccgggccccatcaagaccccgcggctcgatgatctggaaggttgggaggaaatgatgtcacagcgtacgttaacccctatgggccacattggcgaaccgaatgacatcgcatggatctgtgtgtacctggcatctgacgaatcgaaatttgcgacgggtgcagaatttgtggtcgacggcgggtggaccgcacag

SEQ ID NO: 12 - protein, 252 aa, Artificial Sequence
  Engineered Variant of Kred from Lactobacillus kefir
MTDRLKHKVAIVTGGTLGIGLAIADKFVEEGAKVVITGRHADVGEKAAKSIGGTDVIRFVQHDASEEAGWTKLFDTTEEAFGPVTTVVNNAGIGVIKSVEDTTTEEWRKLLSVNLDGVFFGTRLGIQRMKNKGLGASIINMSSISGLVGDPTLGAYNASKGAVRIMSKSAALDCALKDYDVRVNTVHPGPIKTPRLDDLEGWEEMMSQRTLTPMGHIGEPNDIAWICVYLASDESKFATGAEFVVDGGWTAQ

SEQ ID NO: 13 - DNA, 756 bp, Artificial Sequence
  Engineered Variant of Kred from Lactobacillus kefir
atgaccgatcgtctgaagcataaagtagccatcgtaaccggcgggacactgggtatcggtttggcaatcgccgataaatttgtagaggagggtgcgaaagtagttattactggtcgtcacgcggatgtaggtgaaaaggccgccaaatcaatcggcggcactgatgttattcgctttgtccagcacgatgcgtccgaagaagcaggctggacgaaactgttcgacaccaccgaggaggcattcggcccggttacgaccgtcgtgaacaatgcagggattggggttattaaaagcgttgaagacactaccacggaggaatggcgtaaactgctgtccgttaatctggatggtgtttttttcggcacccgtctgggcattcagcgcatgaaaaataaaggcttgggcgctagcatcatcaatatgagcagtattctggggctcgtaggcgatccgggtctgggggcatacaacgcttccaagggggcggtacgtatcatgtcgaaaagcgcagcgctggattgcgcactgaaggactacgatgtgcgtgtcaacacagtacatccgggccccatcaagaccccgcggctcgatgatctggaaggttgggaggaaatgatgtcacagcgtacgttaacccctatgggccacattggcgaaccgaatgacatcgcatggatctgtgtgtacctggcatctgacgaatcgaaatttgcgacgggtgcagaatttgtggtcgacggcgggtggaccgcacag

SEQ ID NO: 14 - protein, 252 aa, Artificial Sequence
  Engineered Variant of Kred from Lactobacillus kefir
MTDRLKHKVAIVTGGTLGIGLAIADKFVEEGAKVVITGRHADVGEKAAKSIGGTDVIRFVQHDASEEAGWTKLFDTTEEAFGPVTTVVNNAGIGVIKSVEDTTTEEWRKLLSVNLDGVFFGTRLGIQRMKNKGLGASIINMSSILGLVGDPGLGAYNASKGAVRIMSKSAALDCALKDYDVRVNTVHPGPIKTPRLDDLEGWEEMMSQRTLTPMGHIGEPNDIAWICVYLASDESKFATGAEFVVDGGWTAQ

SEQ ID NO: 15 - DNA, 756 bp, Artificial Sequence
  Engineered Variant of Kred from Lactobacillus kefir
atgaccgatcgtctgaagcataaagtagccatcgtaaccggcgggacactgggtatcggtttggcaatcgccgataaatttgtagaggagggtgcgaaagtagttattactggtcgtcacgcggatgtaggtgaaaaggccgccaaatcaatcggcggcactgatgttattcgctttgtccagcacgatgcgtccgaagaagcaggctggacgaaactgttcgacaccaccgaggaggcattcggcccggttacgaccgtcgtgaacaatgcagggattggggttattaaaagcgttgaagacactaccacggaggaatggcgtaaactgctgtccgttaatctggatggtgtttttttcggcacccgtctgggcattcagcgcatgaaaaataaaggcttgggcgctagcatcatcaatatgagcagtattctggggctcgtaggcgatccgacgctgggggcatacaacgcttccaagggggcggtacgtatcatgtcgaaaagcgcagcgctggattgcgcactgaaggactacgatgtgcgtgtcaacacagtacatccgggccccatcaagaccccgcggcatgatgatctggaaggttgggaggaaatgatgtcacagcgtacgttaacccctatgggccacattggcgaaccgaatgacatcgcatggatctgtgtgtacctggcatctgacgaatcgaaatttgcgacgggtgcagaatttgtggtcgacggcgggtggaccgcacag

SEQ ID NO: 16 - protein, 252 aa, Artificial Sequence
  Engineered Variant of Kred from Lactobacillus kefir
MTDRLKHKVAIVTGGTLGIGLAIADKFVEEGAKVVITGRHADVGEKAAKSIGGTDVIRFVQHDASEEAGWTKLFDTTEEAFGPVTTVVNNAGIGVIKSVEDTTTEEWRKLLSVNLDGVFFGTRLGIQRMKNKGLGASIINMSSILGLVGDPTLGAYNASKGAVRIMSKSAALDCALKDYDVRVNTVHPGPIKTPRHDDLEGWEEMMSQRTLTPMGHIGEPNDIAWICVYLASDESKFATGAEFVVDGGWTAQ

SEQ ID NO: 17 - DNA, 756 bp, Artificial Sequence
  Engineered Variant of Kred from Lactobacillus kefir
atgaccgatcgtctgaagcataaagtagccatcgtaaccggcgggacactgggtatcggtttggcaatcgccgataaatttgtagaggagggtgcgaaagtagttattactggtcgtcacgcggatgtaggtgaaaaggccgccaaatcaatcggcggcactgatgttattcgctttgtccagcacgatgcgtccgaagaagcaggctggacgaaactgttcgacaccaccgaggaggcattcggcccggttacgaccgtcgtgaacaatgcaggggttggggttattaaaagcgttgaagacactaccacggaggaatggcgtaaactgctgtccgttaatctggatggtgtttttttcggcacccgtctgggcattcagcgcatgaaaaataaaggcttgggcgctagcatcatcaatatgagcagtattctggggctcgtaggcgatccgacgctgggggcatacaacgcttccaagggggcggtacgtatcatgtcgaaaagcgcagcgctggattgcgcactgaaggactacgatgtgcgtgtcaacacagtacatccgggccccatcaagaccccgcggctcgatgatctggaaggttgggaggaaatgatgtcacagcgtacgttaacccctatgggccacattggcgaaccgaatgacatcgcatggatctgtgtgtacctggcatctgacgaatcgaaatttgcgacgggtgcagaatttgtggtcgacggcgggtggaccgcacag

SEQ ID NO: 18 - protein, 252 aa, Artificial Sequence
  Engineered Variant of Kred from Lactobacillus kefir
MTDRLKHKVAIVTGGTLGIGLAIADKFVEEGAKVVITGRHADVGEKAAKSIGGTDVIRFVQHDASEEAGWTKLFDTTEEAFGPVTTVVNNAGVGVIKSVEDTTTEEWRKLLSVNLDGVFFGTRLGIQRMKNKGLGASIINMSSILGLVGDPTLGAYNASKGAVRIMSKSAALDCALKDYDVRVNTVHPGPIKTPRLDDLEGWEEMMSQRTLTPMGHIGEPNDIAWICVYLASDESKFATGAEFVVDGGWTAQ

SEQ ID NO: 19 - DNA, 756 bp, Artificial Sequence
  Engineered Variant of Kred from Lactobacillus kefir
atgaccgatcgtctgaagcataaagtagccatcgtaaccggcgggacactgggtatcggtttggcaatcgccgataaatttgtagaggagggtgcgaaagtagttattactggtcgtcacgcggatgtaggtgaaaaggccgccaaatcaatcggcggcactgatgttattcgctttgtccagcacgatgcgtccgaagaagcaggctggacgaaactgttcgacaccaccgaggaggcattcggcccggttacgaccgtcgtgaacaatgcagggattggggttattaaaagcgttgaagacactaccacggaggaatggcgtaaactgctgtccgttaatctggatggtgtttttttcggcacccgtctgggcattcagcgcatgaaaaataaaggcttgggcgctagcatcatcaatatgagcagtattatggggctcgtaggcgatccgacgctgggggcatacaacgcttccaagggggcggtacgtatcatgtcgaaaagcgcagcgctggattgcgcactgaaggactacgatgtgcgtgtcaacacagtacatccgggccccatcaagaccccgcggctcgatgatctggaaggttgggaggaaatgatgtcacagcgtacgttaacccctatgggccacattggcgaaccgaatgacatcgcatggatctgtgtgtacctggcatctgacgaatcgaaatttgcgacgggtgcagaatttgtggtcgacggcgggtggaccgcacag

SEQ ID NO: 20 - protein, 252 aa, Artificial Sequence
  Engineered Variant of Kred from Lactobacillus kefir
MTDRLKHKVAIVTGGTLGIGLAIADKFVEEGAKVVITGRHADVGEKAAKSIGGTDVIRFVQHDASEEAGWTKLFDTTEEAFGPVTTVVNNAGIGVIKSVEDTTTEEWRKLLSVNLDGVFFGTRLGIQRMKNKGLGASIINMSSIMGLVGDPTLGAYNASKGAVRIMSKSAALDCALKDYDVRVNTVHPGPIKTPRLDDLEGWEEMMSQRTLTPMGHIGEPNDIAWICVYLASDESKFATGAEFVVDGGWTAQ

SEQ ID NO: 21 - DNA, 756 bp, Artificial Sequence
  Engineered Variant of Kred from Lactobacillus kefir
atgaccgatcgtctgaagcataaagtagccatcgtaaccggcgggacactgggtatcggtttggcaatcgccgataaatttgtagaggagggtgcgaaagtagttattactggtcgtcacgcggatgtaggtgaaaaggccgccaaatcaatcggcggcactgatgttattcgctttgtccagcacgatgcgtccgaagaagcaggctggacgaaactgttcgacaccaccgaggaggcattcggcccggttacgaccgtcgtgaacaatgcagggattggggttattaaaagcgttgaagacactaccacggaggaatggcgtaaactgctgtccgttaatctggatggtgtttttttcggcacccgtctgggcattcagcgcatgaaaaataaaggcttgggcgctagcatcatcaatatgagcagtattggtgggctcgtaggcgatccgacgctgggggcatacaacgcttccaagggggcggtacgtatcatgtcgaaaagcgcagcgctggattgcgcactgaaggactacgatgtgcgtgtcaacacagtacatccgggccccatcaagaccccgcggctcgatgatctggaaggttgggaggaaatgatgtcacagcgtacgttaacccctatgggccacattggcgaaccgaatgacatcgcatggatctgtgtgtacctggcatctgacgaatcgaaatttgcgacgggtgcagaatttgtggtcgacggcgggtggaccgcacag

SEQ ID NO: 22 - protein, 252 aa, Artificial Sequence
  Engineered Variant of Kred from Lactobacillus kefir
MTDRLKHKVAIVTGGTLGIGLAIADKFVEEGAKVVITGRHADVGEKAAKSIGGTDVIRFVQHDASEEAGWTKLFDTTEEAFGPVTTVVNNAGIGVIKSVEDTTTEEWRKLLSVNLDGVFFGTRLGIQRMKNKGLGASIINMSSIGGLVGDPTLGAYNASKGAVRIMSKSAALDCALKDYDVRVNTVHPGPIKTPRLDDLEGWEEMMSQRTLTPMGHIGEPNDIAWICVYLASDESKFATGAEFVVDGGWTAQ

SEQ ID NO: 23 - DNA, 756 bp, Artificial Sequence
  Engineered Variant of Kred from Lactobacillus kefir
atgaccgatcgtctgaagcataaagtagccatcgtaaccggcgggacactgggtatcggtttggcaatcgccgataaatttgtagaggagggtgcgaaagtagttattactggtcgtcacgcggatgtaggtgaaaaggccgccaaatcaatcggcggcactgatgttattcgctttgtccagcacgatgcgtccgaagaagcaggctggacgaaactgttcgacaccaccgaggaggcattcggcccggttacgaccgtcgtgaacaatgcagggattggggttattaaaagcgttgaagacactaccacggaggaatggcgtaaactgctgtccgttaatctggatggtgtttttttcggcacccgtctgggcattcagcgcatgaaaaataaaggcttgggcgctagcatcatcaatatgagcagtatttgtgggctcgtaggcgatccgacgctgggggcatacaacgcttccaagggggcggtacgtatcatgtcgaaaagcgcagcgctggattgcgcactgaaggactacgatgtgcgtgtcaacacagtacatccgggccccatcaagaccccgcggctcgatgatctggaaggttgggaggaaatgatgtcacagcgtacgttaacccctatgggccacattggcgaaccgaatgacatcgcatggatctgtgtgtacctggcatctgacgaatcgaaatttgcgacgggtgcagaatttgtggtcgacggcgggtggaccgcacag

SEQ ID NO: 24 - protein, 252 aa, Artificial Sequence
  Engineered Variant of Kred from Lactobacillus kefir
MTDRLKHKVAIVTGGTLGIGLAIADKFVEEGAKVVITGRHADVGEKAAKSIGGTDVIRFVQHDASEEAGWTKLFDTTEEAFGPVTTVVNNAGIGVIKSVEDTTTEEWRKLLSVNLDGVFFGTRLGIQRMKNKGLGASIINMSSICGLVGDPTLGAYNASKGAVRIMSKSAALDCALKDYDVRVNTVHPGPIKTPRLDDLEGWEEMMSQRTLTPMGHIGEPNDIAWICVYLASDESKFATGAEFVVDGGWTAQ

SEQ ID NO: 25 - DNA, 756 bp, Artificial Sequence
  Engineered Variant of Kred from Lactobacillus kefir
atgaccgatcgtctgaagcataaagtagccatcgtaaccggcgggacactgggtatcggtttggcaatcgccgataaatttgtagaggagggtgcgaaagtagttattactggtcgtcacgcggatgtaggtgaaaaggccgccaaatcaatcggcggcactgatgttattcgctttgtccagcacgatgcgtccgaagaagcaggctggacgaaactgttcgacaccaccgaggaggcattcggcccggttacgaccgtcgtgaacaatgcagggattggggttattaaaagcgttgaagacactaccacggaggaatggcgtaaactgctgtccgttaatctggatggtgtttttttcggcacccgtctgggcattcagcgcatgaaaaataaaggcttgggcgctagcatcatcaatatgagcagtattctggggctcgtaggcgatccgacggttggggcatacaacgcttccaagggggcggtacgtatcatgtcgaaaagcgcagcgctggattgcgcactgaaggactacgatgtgcgtgtcaacacagtacatccgggccccatcaagaccccgcggctcgatgatctggaaggttgggaggaaatgatgtcacagcgtacgttaacccctatgggccacattggcgaaccgaatgacatcgcatggatctgtgtgtacctggcatctgacgaatcgaaatttgcgacgggtgcagaatttgtggtcgacggcgggtggaccgcacag

SEQ ID NO: 26 - protein, 252 aa, Artificial Sequence
  Engineered Variant of Kred from Lactobacillus kefir
MTDRLKHKVAIVTGGTLGIGLAIADKFVEEGAKVVITGRHADVGEKAAKSIGGTDVIRFVQHDASEEAGWTKLFDTTEEAFGPVTTVVNNAGIGVIKSVEDTTTEEWRKLLSVNLDGVFFGTRLGIQRMKNKGLGASIINMSSILGLVGDPTVGAYNASKGAVRIMSKSAALDCALKDYDVRVNTVHPGPIKTPRLDDLEGWEEMMSQRTLTPMGHIGEPNDIAWICVYLASDESKFATGAEFVVDGGWTAQ

SEQ ID NO: 27 - DNA, 756 bp, Artificial Sequence
  Engineered Variant of Kred from Lactobacillus kefir
atgaccgatcgtctgaagcataaagtagccatcgtaaccggcgggacactgggtatcggtttggcaatcgccgataaatttgtagaggagggtgcgaaagtagttattactggtcgtcacgcggatgtaggtgaaaaggccgccaaatcaatcggcggcactgatgttattcgctttgtccagcacgatgcgtccgaagaagcaggctggacgaaactgttcgacaccaccgaggaggcattcggcccggttacgaccgtcgtgaacaatgcagggattggggttattaaaagcgttgaagacactaccacggaggaatggcgtaaactgctgtccgttaatctggatggtgtttttttcggcacccgtctgggcattcagcgcatgaaaaataaaggcttgggcgctagcatcatcaatatgagcagtattctggggctcgtaggcgatccgacgctgggggcatacaacgcttccaagggggcggtacgtatcatgtcgaaaagcgcagcgctggattgcgcactgaaggactacgatgtgcgtgtcaacacagtacatccgggccccatcaagaccccgcggctcagggatctggaaggttgggaggaaatgatgtcacagcgtacgttaacccctatgggccacattggcgaaccgaatgacatcgcatggatctgtgtgtacctggcatctgacgaatcgaaatttgcgacgggtgcagaatttgtggtcgacggcgggtggaccgcacag

SEQ ID NO: 28 - protein, 252 aa, Artificial Sequence
  Engineered Variant of Kred from Lactobacillus kefir
MTDRLKHKVAIVTGGTLGIGLAIADKFVEEGAKVVITGRHADVGEKAAKSIGGTDVIRFVQHDASEEAGWTKLFDTTEEAFGPVTTVVNNAGIGVIKSVEDTTTEEWRKLLSVNLDGVFFGTRLGIQRMKNKGLGASIINMSSILGLVGDPTLGAYNASKGAVRIMSKSAALDCALKDYDVRVNTVHPGPIKTPRLRDLEGWEEMMSQRTLTPMGHIGEPNDIAWICVYLASDESKFATGAEFVVDGGWTAQ

SEQ ID NO: 29 - DNA, 756 bp, Artificial Sequence
  Engineered Variant of Kred from Lactobacillus kefir
atgaccgatcgtctgaagcataaagtagccatcgtaaccggcgggacactgggtatcggtagggcaatcgccgataaatttgtagaggagggtgcgaaagtagttattactggtcgtcacgcggatgtaggtgaaaaggccgccaaatcaatcggcggcactgatgttattcgctttgtccagcacgatgcgtccgaagaagcaggctggacgaaactgttcgacaccaccgaggaggcattcggcccggttacgaccgtcgtgaacaatgcagggattggggttattaaaagcgttgaagacactaccacggaggaatggcgtaaactgctgtccgttaatctggatggtgtttttttcggcacccgtctgggcattcagcgcatgaaaaataaaggcttgggcgctagcatcatcaatatgagcagtattctggggctcgtaggcgatccgacgctgggggcatacaacgcttccaagggggcggtacgtatcatgtcgaaaagcgcagcgctggattgcgcactgaaggactacgatgtgcgtgtcaacacagtacatccgggccccatcaagaccccgcggctcgatgatctggaaggttgggaggaaatgatgtcacagcgtacgttaacccctatgggccacattggcgaaccgaatgacatcgcatggatctgtgtgtacctggcatctgacgaatcgaaatttgcgacgggtgcagaatttgtggtcgacggcgggtggaccgcacag

SEQ ID NO: 30 - protein, 252 aa, Artificial Sequence
  Engineered Variant of Kred from Lactobacillus kefir
MTDRLKHKVAIVTGGTLGIGRAIADKFVEEGAKVVITGRHADVGEKAAKSIGGTDVIRFVQHDASEEAGWTKLFDTTEEAFGPVTTVVNNAGIGVIKSVEDTTTEEWRKLLSVNLDGVFFGTRLGIQRMKNKGLGASIINMSSILGLVGDPTLGAYNASKGAVRIMSKSAALDCALKDYDVRVNTVHPGPIKTPRLDDLEGWEEMMSQRTLTPMGHIGEPNDIAWICVYLASDESKFATGAEFVVDGGWTAQ

SEQ ID NO: 31 - DNA, 756 bp, Artificial Sequence
  Engineered Variant of Kred from Lactobacillus kefir
atgaccgatcgtctgaagcataaagtagccatcgtaaccggcgggacactgggtatcggtttggcaatcgccgataaatttgtagaggagggtgcgaaagtagttattactggtcgtcacgcggatgtaggtgaaaaggccgccaaatcaatcggcggcactgatgttattcgctttgtccagcacgatgcgtccgaagaagcaggctggacgaaactgttcgacaccaccgaggaggcattcggcccggttacgaccgtcgtgaacaatgcaggggatggggttattaaaagcgttgaagacactaccacggaggaatggcgtaaactgctgtccgttaatctggatggtgtttttttcggcacccgtctgggcattcagcgcatgaaaaataaaggcttgggcgctagcatcatcaatatgagcagtattctggggctcgtaggcgatccgacgctgggggcatacaacgcttccaagggggcggtacgtatcatgtcgaaaagcgcagcgctggattgcgcactgaaggactacgatgtgcgtgtcaacacagtacatccgggccccatcaagaccccgcggctcgatgatctggaaggttgggaggaaatgatgtcacagcgtacgttaacccctatgggccacattggcgaaccgaatgacatcgcatggatctgtgtgtacctggcatctgacgaatcgaaatttgcgacgggtgcagaatttgtggtcgacggcgggtggaccgcacag

SEQ ID NO: 32 - protein, 252 aa, Artificial Sequence
  Engineered Variant of Kred from Lactobacillus kefir
MTDRLKHKVAIVTGGTLGIGLAIADKFVEEGAKVVITGRHADVGEKAAKSIGGTDVIRFVQHDASEEAGWTKLFDTTEEAFGPVTTVVNNAGDGVIKSVEDTTTEEWRKLLSVNLDGVFFGTRLGIQRMKNKGLGASIINMSSILGLVGDPTLGAYNASKGAVRIMSKSAALDCALKDYDVRVNTVHPGPIKTPRLDDLEGWEEMMSQRTLTPMGHIGEPNDIAWICVYLASDESKFATGAEFVVDGGWTAQ

SEQ ID NO: 33 - DNA, 756 bp, Artificial Sequence
  Engineered Variant of Kred from Lactobacillus kefir
atgaccgatcgtctgaagcataaagtagccatcgtaaccggcgggacactgggtatcggtttggcaatcgccgataaatttgtagaggagggtgcgaaagtagttattactggtcgtcacgcggatgtaggtgaaaaggccgccaaatcaatcggcggcactgatgttattcgctttgtccagcacgatgcgtccgaagaagcaggctggacgaaactgttcgacaccaccgaggaggcattcggcccggttacgaccgtcgtgaacaatgcagggattggggttattaaaagcgttgaagacactaccacggaggaatggcgtaaactgctgtccgttaatctggatggtgtttttttcggcacccgtctgggcattcagcgcatgaaaaataaaggcttgggcgctagcatcatcaatatgagcagtattctggggctcattggcgatccgacgctgggggcatacaacgcttccaagggggcggtacgtatcatgtcgaaaagcgcagcgctggattgcgcactgaaggactacgatgtgcgtgtcaacacagtacatccgggccccatcaagaccccgcggctcgatgatctggaaggttgggaggaaatgatgtcacagcgtacgttaacccctatgggccacattggcgaaccgaatgacatcgcatggatctgtgtgtacctggcatctgacgaatcgaaatttgcgacgggtgcagaatttgtggtcgacggcgggtggaccgcacag

SEQ ID NO: 34 - protein, 252 aa, Artificial Sequence
  Engineered Variant of Kred from Lactobacillus kefir
MTDRLKHKVAIVTGGTLGIGLAIADKFVEEGAKVVITGRHADVGEKAAKSIGGTDVIRFVQHDASEEAGWTKLFDTTEEAFGPVTTVVNNAGIGVIKSVEDTTTEEWRKLLSVNLDGVFFGTRLGIQRMKNKGLGASIINMSSILGLIGDPTLGAYNASKGAVRIMSKSAALDCALKDYDVRVNTVHPGPIKTPRLDDLEGWEEMMSQRTLTPMGHIGEPNDIAWICVYLASDESKFATGAEFVVDGGWTAQ

SEQ ID NO: 35 - DNA, 756 bp, Artificial Sequence
  Engineered Variant of Kred from Lactobacillus kefir
atgaccgatcgtctgaagcataaagtagccatcgtaaccggcgggacactgggtatcggtttggcaatcgccgataaatttgtagaggagggtgcgaaagtagttattactggtcgtcacgcggatgtaggtgaaaaggccgccaaatcaatcggcggcactgatgttattcgctttgtccagcacgatgcgtccgaagaagcaggctggacgaaactgttcgacaccaccgaggaggcattcggcccggttacgaccgtcgtgaacaatgcagggattggggttattaaaagcgttgaagacactaccacggaggaatggcgtaaactgctgtccgttaatctggatggtgtttttttcggcacccgtctgggcattcagcgcatgaaaaataaaggcttgggcgctagcatcatcaatatgagcagtattctggggctcgtaggcgatccgacgtgtggggcatacaacgcttccaagggggcggtacgtatcatgtcgaaaagcgcagcgctggattgcgcactgaaggactacgatgtgcgtgtcaacacagtacatccgggccccatcaagaccccgcggctcgatgatctggaaggttgggaggaaatgatgtcacagcgtacgttaacccctatgggccacattggcgaaccgaatgacatcgcatggatctgtgtgtacctggcatctgacgaatcgaaatttgcgacgggtgcagaatttgtggtcgacggcgggtggaccgcacag

SEQ ID NO: 36 - protein, 252 aa, Artificial Sequence
  Engineered Variant of Kred from Lactobacillus kefir
MTDRLKHKVAIVTGGTLGIGLAIADKFVEEGAKVVITGRHADVGEKAAKSIGGTDVIRFVQHDASEEAGWTKLFDTTEEAFGPVTTVVNNAGIGVIKSVEDTTTEEWRKLLSVNLDGVFFGTRLGIQRMKNKGLGASIINMSSILGLVGDPTCGAYNASKGAVRIMSKSAALDCALKDYDVRVNTVHPGPIKTPRLDDLEGWEEMMSQRTLTPMGHIGEPNDIAWICVYLASDESKFATGAEFVVDGGWTAQ

SEQ ID NO: 37 - DNA, 756 bp, Artificial Sequence
  Engineered Variant of Kred from Lactobacillus kefir
atgaccgatcgtctgaagcataaagtagccatcgtaaccggcgggacactgggtatcggtttggcaatcgccgataaatttgtagaggagggtgcgaaagtagttattactggtcgtcacgcggatgtaggtgaaaaggccgccaaatcaatcggcggcactgatgttattcgctttgtccagcacgatgcgtccgaagaagcaggctggacgaaactgttcgacaccaccgaggaggcattcggcccggttacgaccgtcgtgaacaatgcagggattggggttattaaaagcgttgaagacactaccacggaggaatggcgtaaactgctgtccgttaatctggatggtgtttttttcggcacccgtctgggcattcagcgcatgaaaaataaaggcttgggcgctagcatcatcaatatgagcagtattctggggctcgtaggcgatccgacgctgggggcatacaacgcttccaagggggcggtacgtatcatgtcgaaaagcgcagcgctggattgcgcactgaaggactacgatgtgcgtgtcaacacagtacatccgggccccatcaagaccccgcggctcgatgatctgcagggttgggaggaaatgatgtcacagcgtacgttaacccctatgggccacattggcgaaccgaatgacatcgcatggatctgtgtgtacctggcatctgacgaatcgaaatttgcgacgggtgcagaatttgtggtcgacggcgggtggaccgcacag

SEQ ID NO: 38 - protein, 252 aa, Artificial Sequence
  Engineered Variant of Kred from Lactobacillus kefir
MTDRLKHKVAIVTGGTLGIGLAIADKFVEEGAKVVITGRHADVGEKAAKSIGGTDVIRFVQHDASEEAGWTKLFDTTEEAFGPVTTVVNNAGIGVIKSVEDTTTEEWRKLLSVNLDGVFFGTRLGIQRMKNKGLGASIINMSSILGLVGDPTLGAYNASKGAVRIMSKSAALDCALKDYDVRVNTVHPGPIKTPRLDDLQGWEEMMSQRTLTPMGHIGEPNDIAWICVYLASDESKFATGAEFVVDGGWTAQ

SEQ ID NO: 39 - DNA, 756 bp, Artificial Sequence
  Engineered Variant of Kred from Lactobacillus kefir
atgaccgatcgtctgaagcataaagtagccatcgtaaccggcgggacactgggtatcggtttggcaatcgccgataaatttgtagaggagggtgcgaaagtagttattactggtcgtcacgcggatgtaggtgaaaaggccgccaaatcaatcggcggcactgatgttattcgctttgtccagcacgatgcgtccgaagaagcaggctggacgaaactgttcgacaccaccgaggaggcattcggcccggttacgaccgtcgtgaacaatgcagggattggggttattaaaagcgttgaagacactaccacggaggaatggcgtaaactgctgtccgttaatctggatggtgtttttttcggcacccgtctgggcattcagcgcatgaaaaataaaggcttgggcgctagcatcatcaatatgagcagtattctggggctcgtaggcgatccgacgctgggggcatacaacgcttccaagggggcggtacgtatcatgtcgaaaagcgcagcgctggattgcgcactgaaggactacgatgtgcgtgtcaacacagtacatccgggccccatcaagaccaggcggctcgatgatctggaaggttgggaggaaatgatgtcacagcgtacgttaacccctatgggccacattggcgaaccgaatgacatcgcatggatctgtgtgtacctggcatctgacgaatcgaaatttgcgacgggtgcagaatttgtggtcgacggcgggtggaccgcacag

SEQ ID NO: 40 - protein, 252 aa, Artificial Sequence
  Engineered Variant of Kred from Lactobacillus kefir
MTDRLKHKVAIVTGGTLGIGLAIADKFVEEGAKVVITGRHADVGEKAAKSIGGTDVIRFVQHDASEEAGWTKLFDTTEEAFGPVTTVVNNAGIGVIKSVEDTTTEEWRKLLSVNLDGVFFGTRLGIQRMKNKGLGASIINMSSILGLVGDPTLGAYNASKGAVRIMSKSAALDCALKDYDVRVNTVHPGPIKTRRLDDLEGWEEMMSQRTLTPMGHIGEPNDIAWICVYLASDESKFATGAEFVVDGGWTAQ

SEQ ID NO: 41 - DNA, 756 bp, Artificial Sequence
  Engineered Variant of Kred from Lactobacillus kefir
atgaccgatcgtctgaagcataaagtagccatcgtaaccggcgggacactgggtatcggtttggcaatcgccgataaatttgtagaggagggtgcgaaagtagttattactggtcgtcacgcggatgtaggtgaaaaggccgccaaatcaatcggcggcactgatgttattcgctttgtccagcacgatgcgtccgaagaagcaggctggacgaaactgttcgacaccaccgaggaggcattcggcccggttacgaccgtcgtgaacaatgcagggattggggttattaaaagcgttgaagacactaccacggaggaatggcgtaaactgctgtccgttaatctggatggtgtttttttcggcacccgtctgggcattcagcgcatgaaaaataaaggcttgggcgctagcatcatcaatatgagcagtattctggggctcgtaggcgatccgacgctgggggcatacaacgcttccaagggggcggtacgtatcatgtcgaaaagcgcagcgctggattgcgcactgaaggactacgatgtgcgtgtcaacacagtacatccgggccccatcaagaccccgcggctcgatgatctgcggggttgggaggaaatgatgtcacagcgtacgttaacccctatgggccacattggcgaaccgaatgacatcgcatggatctgtgtgtacctggcatctgacgaatcgaaatttgcgacgggtgcagaatttgtggtcgacggcgggtggaccgcacag

SEQ ID NO: 42 - protein, 252 aa, Artificial Sequence
  Engineered Variant of Kred from Lactobacillus kefir
MTDRLKHKVAIVTGGTLGIGLAIADKFVEEGAKVVITGRHADVGEKAAKSIGGTDVIRFVQHDASEEAGWTKLFDTTEEAFGPVTTVVNNAGIGVIKSVEDTTTEEWRKLLSVNLDGVFFGTRLGIQRMKNKGLGASIINMSSILGLVGDPTLGAYNASKGAVRIMSKSAALDCALKDYDVRVNTVHPGPIKTPRLDDLRGWEEMMSQRTLTPMGHIGEPNDIAWICVYLASDESKFATGAEFVVDGGWTAQ

SEQ ID NO: 43 - DNA, 756 bp, Artificial Sequence
  Engineered Variant of Kred from Lactobacillus kefir
atgaccgatcgtctgaagcataaagtagccatcgtaaccggcgggacactgggtatcggtttggcaatcgccgataaatttgtagaggagggtgcgaaagtagttattactggtcgtcacgcggatgtaggtgaaaaggccgccaaatcaatcggcggcactgatgttattcgctttgtccagcacgatgcgtccgaagaagcaggctggacgaaactgttcgacaccaccgaggaggcattcggcccggttacgaccgtcgtgaacaatgcagggattggggttattaaaagcgttgaagacactaccacggaggaatggcgtaaactgctgtccgttaatctggatggtgtttttttcggcacccgtctgggcattcagcgcatgaaaaataaaggcttgggcgctagcatcatcaatatgagcagtattctggggctcgtaggcgatccgacgctgggggcatacaacgcttccaagggggcggtacgtatcatgtcgaaaagcgcagcgctggattgcgcactgaaggactacgatgtgcgtgtcaacacagtacatccgggccccatcaagaccccgcggctcgatgatctggaaggttgggaggaaatggtgtcacagcgtacgttaacccctatgggccacattggcgaaccgaatgacatcgcatggatctgtgtgtacctggcatctgacgaatcgaaatttgcgacgggtgcagaatttgtggtcgacggcgggtggaccgcacag

SEQ ID NO: 44 - protein, 252 aa, Artificial Sequence
  Engineered Variant of Kred from Lactobacillus kefir
MTDRLKHKVAIVTGGTLGIGLAIADKFVEEGAKVVITGRHADVGEKAAKSIGGTDVIRFVQHDASEEAGWTKLFDTTEEAFGPVTTVVNNAGIGVIKSVEDTTTEEWRKLLSVNLDGVFFGTRLGIQRMKNKGLGASIINMSSILGLVGDPTLGAYNASKGAVRIMSKSAALDCALKDYDVRVNTVHPGPIKTPRLDDLEGWEEMVSQRTLTPMGHIGEPNDIAWICVYLASDESKFATGAEFVVDGGWTAQ

SEQ ID NO: 45 - DNA, 756 bp, Artificial Sequence
  Engineered Variant of Kred from Lactobacillus kefir
atgaccgatcgtctgaagcataaagtagccatcgtaaccggcgggacactgggtatcggtttggcaatcgccgataaatttgtagaggagggtgcgaaagtagttattactggtcgtcacgcggatgtaggtgaaaaggccgccaaatcaatcggcggcactgatgttattcgctttgtccagcacgatgcgtccgaagaagcaggctggacgaaactgttcgacaccaccgaggaggcattcggcccggttacgaccgtcgtgaacaatgcagggatgggggttattaaaagcgttgaagacactaccacggaggaatggcgtaaactgctgtccgttaatctggatggtgtttttttcggcacccgtctgggcattcagcgcatgaaaaataaaggcttgggcgctagcatcatcaatatgagcagtattctggggctcgtaggcgatccgacgctgggggcatacaacgcttccaagggggcggtacgtatcatgtcgaaaagcgcagcgctggattgcgcactgaaggactacgatgtgcgtgtcaacacagtacatccgggccccatcaagaccccgcggctcgatgatctggaaggttgggaggaaatgatgtcacagcgtacgttaacccctatgggccacattggcgaaccgaatgacatcgcatggatctgtgtgtacctggcatctgacgaatcgaaatttgcgacgggtgcagaatttgtggtcgacggcgggtggaccgcacag

SEQ ID NO: 46 - protein, 252 aa, Artificial Sequence
  Engineered Variant of Kred from Lactobacillus kefir
MTDRLKHKVAIVTGGTLGIGLAIADKFVEEGAKVVITGRHADVGEKAAKSIGGTDVIRFVQHDASEEAGWTKLFDTTEEAFGPVTTVVNNAGMGVIKSVEDTTTEEWRKLLSVNLDGVFFGTRLGIQRMKNKGLGASIINMSSILGLVGDPTLGAYNASKGAVRIMSKSAALDCALKDYDVRVNTVHPGPIKTPRLDDLEGWEEMMSQRTLTPMGHIGEPNDIAWICVYLASDESKFATGAEFVVDGGWTAQ

SEQ ID NO: 47 - DNA, 756 bp, Artificial Sequence
  Engineered Variant of Kred from Lactobacillus kefir
atgaccgatcgtctgaagcataaagtagccatcgtaaccggcgggacactgggtatcggtttggcaatcgccgataaatttgtagaggagggtgcgaaagtagttattactggtcgtcacgcggatgtaggtgaaaaggccgccaaatcaatcggcggcactgatgttattcgctttgtccagcacgatgcgtccgaagaagcaggctggacgaaactgttcgacaccaccgaggaggcattcggcccggttacgaccgtcgtgaacaatgcagggattggggttattaaaagcgttgaagacactaccacggaggaatggcgtaaactgctgtccgttaatctggatggtgtttttttcggcacccgtctgggcattcagcgcatgaaaaataaaggcttgggcgctagcatcatcaatatgagcagtattctggggctcgtaggcgatccgacgctgggggcatacaacgcttccaagggggcggtacgtatcatgtcgaaaagcgcagcgctggattgcgcactgaaggactacgatgtgcgtgtcaacacagtacatccgggccccatcaagaccccgcggctcggtgatctggaaggttgggaggaaatgatgtcacagcgtacgttaacccctatgggccacattggcgaaccgaatgacatcgcatggatctgtgtgtacctggcatctgacgaatcgaaatttgcgacgggtgcagaatttgtggtcgacggcgggtggaccgcacag

SEQ ID NO: 48 - protein, 252 aa, Artificial Sequence
  Engineered Variant of Kred from Lactobacillus kefir
MTDRLKHKVAIVTGGTLGIGLAIADKFVEEGAKVVITGRHADVGEKAAKSIGGTDVIRFVQHDASEEAGWTKLFDTTEEAFGPVTTVVNNAGIGVIKSVEDTTTEEWRKLLSVNLDGVFFGTRLGIQRMKNKGLGASIINMSSILGLVGDPTLGAYNASKGAVRIMSKSAALDCALKDYDVRVNTVHPGPIKTPRLGDLEGWEEMMSQRTLTPMGHIGEPNDIAWICVYLASDESKFATGAEFVVDGGWTAQ

SEQ ID NO: 49 - DNA, 756 bp, Artificial Sequence
  Engineered Variant of Kred from Lactobacillus kefir
atgaccgatcgtctgaagcataaagtagccatcgtaaccggcgggacactgggtatcggtttggcaatcgccgataaatttgtagaggagggtgcgaaagtagttattactggtcgtcacgcggatgtaggtgaaaaggccgccaaatcaatcggcggcactgatgttattcgctttgtccagcacgatgcgtccgaagaagcaggctggacgaaactgttcgacaccaccgaggaggcattcggcccggttacgaccgtcgtgaacaatgcagggattggggttattaaaagcgttgaagacactaccacggaggaatggcgtaaactgctgtccgttaatctggatggtgtttttttcggcacccgtctgggcattcagcgcatgaaaaataaaggcttgggcgctagcatcatcaatatgagcagtattctggggctcgtaggcgatccgacgctgggggcatacaacgcttccaagggggcggtacgtatcatgtcgaaaagcgcagcgctggattgcgcactgaaggactacgatgtgcgtgtcaacacagtacatccgggccccatcaagaccaatcggctcgatgatctggaaggttgggaggaaatgatgtcacagcgtacgttaacccctatgggccacattggcgaaccgaatgacatcgcatggatctgtgtgtacctggcatctgacgaatcgaaatttgcgacgggtgcagaatttgtggtcgacggcgggtggaccgcacag

SEQ ID NO: 50 - protein, 252 aa, Artificial Sequence
  Engineered Variant of Kred from Lactobacillus kefir
MTDRLKHKVAIVTGGTLGIGLAIADKFVEEGAKVVITGRHADVGEKAAKSIGGTDVIRFVQHDASEEAGWTKLFDTTEEAFGPVTTVVNNAGIGVIKSVEDTTTEEWRKLLSVNLDGVFFGTRLGIQRMKNKGLGASIINMSSILGLVGDPTLGAYNASKGAVRIMSKSAALDCALKDYDVRVNTVHPGPIKTNRLDDLEGWEEMMSQRTLTPMGHIGEPNDIAWICVYLASDESKFATGAEFVVDGGWTAQ

SEQ ID NO: 51 - DNA, 756 bp, Artificial Sequence
  Engineered Variant of Kred from Lactobacillus kefir
atgaccgatcgtctgaagcataaagtagccatcgtaaccggcgggacactgggtatcggtttggcaatcgccgataaatttgtagaggagggtgcgaaagtagttattactggtcgtcacgcggatgtaggtgaaaaggccgccaaatcaatcggcggcactgatgttattcgctttgtccagcacgatgcgtccgaagaagcaggctggacgaaactgttcgacaccaccgaggaggcattcggcccggttacgaccgtcgtgaacaatgcagggattggggttattaaaagcgttgaagacactaccacggaggaatggcgtaaactgctgtccgttaatctggatggtgtttttttcggcacccgtctgggcattcagcgcatgaaaaataaaggcttgggcgctagcatcatcaatatgagcagtattctggggctcgtaggcgatccgacgctgggggcatacaacgcttccaagggggcggtacgtatcatgtcgaaaagcgcagcgctggattgcgcactgaaggactacgatgtgcgtgtcaacacagtacatccgggccccatcaagaccccgcggctcgatgatctgttgggttgggaggaaatgatgtcacagcgtacgttaacccctatgggccacattggcgaaccgaatgacatcgcatggatctgtgtgtacctggcatctgacgaatcgaaatttgcgacgggtgcagaatttgtggtcgacggcgggtggaccgcacag

SEQ ID NO: 52 - protein, 252 aa, Artificial Sequence
  Engineered Variant of Kred from Lactobacillus kefir
MTDRLKHKVAIVTGGTLGIGLAIADKFVEEGAKVVITGRHADVGEKAAKSIGGTDVIRFVQHDASEEAGWTKLFDTTEEAFGPVTTVVNNAGIGVIKSVEDTTTEEWRKLLSVNLDGVFFGTRLGIQRMKNKGLGASIINMSSILGLVGDPTLGAYNASKGAVRIMSKSAALDCALKDYDVRVNTVHPGPIKTPRLDDLLGWEEMMSQRTLTPMGHIGEPNDIAWICVYLASDESKFATGAEFVVDGGWTAQ

SEQ ID NO: 53 - DNA, 756 bp, Artificial Sequence
  Engineered Variant of Kred from Lactobacillus kefir
atgaccgatcgtctgaagcataaagtagccatcgtaaccggcgggacactgggtatcggtttggcaatcgccgataaatttgtagaggagggtgcgaaagtagttattactggtcgtcacgcggatgtaggtgaaaaggccgccaaatcaatcggcggcactgatgttattcgctttgtccagcacgatgcgtccgaagaagcaggctggacgaaactgttcgacaccaccgaggaggcattcggcccggttacgaccgtcgtgaacaatgcagggattggggttattaaaagcgttgaagacactaccacggaggaatggcgtaaaattctgtccgttaatctggatggtgtttttttcggcacccgtctgggcattcagcgcatgaaaaataaaggcttgggcgctagcatcatcaatatgagcagtattctggggctcgtaggcgatccgacgctgggggcatacaacgcttccaagggggcggtacgtatcatgtcgaaaagcgcagcgctggattgcgcactgaaggactacgatgtgcgtgtcaacacagtacatccgggccccatcaagaccccgcggctcgatgatctggaaggttgggaggaaatgatgtcacagcgtacgttaacccctatgggccacattggcgaaccgaatgacatcgcatggatctgtgtgtacctggcatctgacgaatcgaaatttgcgacgggtgcagaatttgtggtcgacggcgggtggaccgcacag

SEQ ID NO: 54 - protein, 252 aa, Artificial Sequence
  Engineered Variant of Kred from Lactobacillus kefir
MTDRLKHKVAIVTGGTLGIGLAIADKFVEEGAKVVITGRHADVGEKAAKSIGGTDVIRFVQHDASEEAGWTKLFDTTEEAFGPVTTVVNNAGIGVIKSVEDTTTEEWRKILSVNLDGVFFGTRLGIQRMKNKGLGASIINMSSILGLVGDPTLGAYNASKGAVRIMSKSAALDCALKDYDVRVNTVHPGPIKTPRLDDLEGWEEMMSQRTLTPMGHIGEPNDIAWICVYLASDESKFATGAEFVVDGGWTAQ

SEQ ID NO: 55 - DNA, 756 bp, Artificial Sequence
  Engineered Variant of Kred from Lactobacillus kefir
atgaccgatcgtctgaagcataaagtagccatcgtaaccggcgggacactgggtatcggtttggcaatcgccgataaatttgtagaggagggtgcgaaagtagttattactggtcgtcacgcggatgtaggtgaaaaggccgccaaatcaatcggcggcactgatgttattcgctttgtccagcacgatgcgtccgaagaagcaggctggacgaaactgttcgacaccaccgaggaggcattcggcccggttacgaccgtcgtgaacaatgcagggattggggttattaaaagcgttgaagacactaccacggaggaatggcgtaaactgctgtccgttaatctggatggtgtttttttcggcacccgtctgggcattcagcgcatgaaaaataaaggcttgggcgctagcatcatcaatatgagcagtattctggggctcgtaggcgatccgacgctgggggcatacaacgcttccaagggggcggtacgtatcatgtcgaaaagcgcagcgctggattgcgcactgaaggactacgatgtgcgtgtcaacacagtacatccgggccccatcaagaccccgcggctcgatgatctggaaggttgggaggaaatgatgtcacagcgtacgttaacccctatgggccacattggcgaaccgaatgacatcgcatggctgtgtgtgtacctggcatctgacgaatcgaaatttgcgacgggtgcagaatttgtggtcgacggcgggtggaccgcacag

SEQ ID NO: 56 - protein, 252 aa, Artificial Sequence
  Engineered Variant of Kred from Lactobacillus kefir
MTDRLKHKVAIVTGGTLGIGLAIADKFVEEGAKVVITGRHADVGEKAAKSIGGTDVIRFVQHDASEEAGWTKLFDTTEEAFGPVTTVVNNAGIGVIKSVEDTTTEEWRKLLSVNLDGVFFGTRLGIQRMKNKGLGASIINMSSILGLVGDPTLGAYNASKGAVRIMSKSAALDCALKDYDVRVNTVHPGPIKTPRLDDLEGWEEMMSQRTLTPMGHIGEPNDIAWLCVYLASDESKFATGAEFVVDGGWTAQ

SEQ ID NO: 57 - DNA, 756 bp, Artificial Sequence
  Engineered Variant of Kred from Lactobacillus kefir
atgaccgatcgtctgaagcataaagtagccatcgtaaccggcgggacactgggtatcggtttggcaatcgccgataaatttgtagaggagggtgcgaaagtagttattactggtcgtcacgcggatgtaggtgaaaaggccgccaaatcaatcggcggcactgatgttattcgctttgtccagcacgatgcgtccgaagaagcaggctggacgaaactgttcgacaccaccgaggaggcattcggcccggttacgaccgtcgtgaacaatgcagggacgggggttattaaaagcgttgaagacactaccacggaggaatggcgtaaactgctgtccgttaatctggatggtgtttttttcggcacccgtctgggcattcagcgcatgaaaaataaaggcttgggcgctagcatcatcaatatgagcagtattctggggctcgtaggcgatccgacgctgggggcatacaacgcttccaagggggcggtacgtatcatgtcgaaaagcgcagcgctggattgcgcactgaaggactacgatgtgcgtgtcaacacagtacatccgggccccatcaagaccccgcggctcgatgatctggaaggttgggaggaaatgatgtcacagcgtacgttaacccctatgggccacattggcgaaccgaatgacatcgcatggatctgtgtgtacctggcatctgacgaatcgaaatttgcgacgggtgcagaatttgtggtcgacggcgggtggaccgcacag

SEQ ID NO: 58 - protein, 252 aa, Artificial Sequence
  Engineered Variant of Kred from Lactobacillus kefir
MTDRLKHKVAIVTGGTLGIGLAIADKFVEEGAKVVITGRHADVGEKAAKSIGGTDVIRFVQHDASEEAGWTKLFDTTEEAFGPVTTVVNNAGTGVIKSVEDTTTEEWRKLLSVNLDGVFFGTRLGIQRMKNKGLGASIINMSSILGLVGDPTLGAYNASKGAVRIMSKSAALDCALKDYDVRVNTVHPGPIKTPRLDDLEGWEEMMSQRTLTPMGHIGEPNDIAWICVYLASDESKFATGAEFVVDGGWTAQ

SEQ ID NO: 59 - DNA, 756 bp, Artificial Sequence
  Engineered Variant of Kred from Lactobacillus kefir
atgaccgatcgtctgaagcataaagtagccatcgtaaccggcgggacactgggtatcggtttggcaatcgccgataaatttgtagaggagggtgcgaaagtagttattactggtcgtcacgcggatgtaggtgaaaaggccgccaaatcaatcggcggcactgatgttattcgctttgtccagcacgatgcgtccgaagaagcaggctggacgaaactgttcgacaccaccgaggaggcattcggcccggttacgaccgtcgtgaacaatgcagggattggggttattaaaagcgttgaagacactaccacggaggaatggcgtaaactgctgtccgttaatctggatggtgtttttttcggcacccgtctgggcattcagcgcatgaaaaataaaggcttgggcgctagcatcatcaatatgagcagtattctggggctcgtaggcgatccgacgctgggggcatacaacgcttccaagggggcggtacgtatcatgtcgaaaagcgcagcgctggattgcgcactgaaggactacgatgtgcgtgtcaacacagtacatccgggccccatcaagaccccgcggctcgatgatctggaaggttgggaggaaatgatgtcacagcgtacgttaagtcctatgggccacattggcgaaccgaatgacatcgcatggatctgtgtgtacctggcatctgacgaatcgaaatttgcgacgggtgcagaatttgtggtcgacggcgggtggaccgcacag

SEQ ID NO: 60 - protein, 252 aa, Artificial Sequence
  Engineered Variant of Kred from Lactobacillus kefir
MTDRLKHKVAIVTGGTLGIGLAIADKFVEEGAKVVITGRHADVGEKAAKSIGGTDVIRFVQHDASEEAGWTKLFDTTEEAFGPVTTVVNNAGIGVIKSVEDTTTEEWRKLLSVNLDGVFFGTRLGIQRMKNKGLGASIINMSSILGLVGDPTLGAYNASKGAVRIMSKSAALDCALKDYDVRVNTVHPGPIKTPRLDDLEGWEEMMSQRTLSPMGHIGEPNDIAWICVYLASDESKFATGAEFVVDGGWTAQ

SEQ ID NO: 61 - DNA, 756 bp, Artificial Sequence
  Engineered Variant of Kred from Lactobacillus kefir
atgaccgatcgtctgaagcataaagtagccatcgtaaccggcgggacactgggtatcggtttggcaatcgccgataaatttgtagaggagggtgcgaaagtagttattactggtcgtcacgcggatgtaggtgaaaaggccgccaaatcaatcggcggcactgatgttattcgctttgtccagcacgatgcgtccgaagaagcaggctggacgaaactgttcgacaccaccgaggaggcattcggcccggttacgaccgtcgtgaacaatgcagggattggggttattaaaagcgttgaagacactaccacggaggaatggcgtaaactgctgtccgttaatctggatggtgtttttttcggcacccgtctgggcattcagcgcatgaaaaataaaggcttgggcgctagcatcatcaatatgagcagtattctggggctcgtaggcgatccgacgctgggggcatacaacgcttccaagggggcggtacgtatcatgtcgaaaagcgcagcgctggattgcgcactgaaggactacgatgtgcgtgtcaacacagtacatccgggccccatcaagacccatcggctcgatgatctggaaggttgggaggaaatgatgtcacagcgtacgttaacccctatgggccacattggcgaaccgaatgacatcgcatggatctgtgtgtacctggcatctgacgaatcgaaatttgcgacgggtgcagaatttgtggtcgacggcgggtggaccgcacag

SEQ ID NO: 62 - protein, 252 aa, Artificial Sequence
  Engineered Variant of Kred from Lactobacillus kefir
MTDRLKHKVAIVTGGTLGIGLAIADKFVEEGAKVVITGRHADVGEKAAKSIGGTDVIRFVQHDASEEAGWTKLFDTTEEAFGPVTTVVNNAGIGVIKSVEDTTTEEWRKLLSVNLDGVFFGTRLGIQRMKNKGLGASIINMSSILGLVGDPTLGAYNASKGAVRIMSKSAALDCALKDYDVRVNTVHPGPIKTHRLDDLEGWEEMMSQRTLTPMGHIGEPNDIAWICVYLASDESKFATGAEFVVDGGWTAQ

SEQ ID NO: 63 - DNA, 756 bp, Artificial Sequence
  Engineered Variant of Kred from Lactobacillus kefir
atgaccgatcgtctgaagcataaagtagccatcgtaaccggcgggacactgggtatcggtttggcaatcgccgataaatttgtagaggagggtgcgaaagtagttattactggtcgtcacgcggatgtaggtgaaaaggccgccaaatcaatcggcggcactgatgttattcgctttgtccagcacgatgcgtccgaagaagcaggctggacgaaactgttcgacaccaccgaggaggcattcggcccggttacgaccgtcgtgaacaatgcagggattggggttattaaaagcgttgaagacactaccacggaggaatggcgtaaactgctgtccgttaatctggatggtgtttttttcggcacccgtctgggcattcagcgcatgaaaaataaaggcttgggcgctagcatcatcaatatgagcagtattctggggctcgtaggcgatccgtctctgggggcatacaacgcttccaagggggcggtacgtatcatgtcgaaaagcgcagcgctggattgcgcactgaaggactacgatgtgcgtgtcaacacagtacatccgggccccatcaagaccccgcggctcgatgatctggaaggttgggaggaaatgatgtcacagcgtacgttaacccctatgggccacattggcgaaccgaatgacatcgcatggatctgtgtgtacctggcatctgacgaatcgaaatttgcgacgggtgcagaatttgtggtcgacggcgggtggaccgcacag

SEQ ID NO: 64 - protein, 252 aa, Artificial Sequence
  Engineered Variant of Kred from Lactobacillus kefir
MTDRLKHKVAIVTGGTLGIGLAIADKFVEEGAKVVITGRHADVGEKAAKSIGGTDVIRFVQHDASEEAGWTKLFDTTEEAFGPVTTVVNNAGIGVIKSVEDTTTEEWRKLLSVNLDGVFFGTRLGIQRMKNKGLGASIINMSSILGLVGDPSLGAYNASKGAVRIMSKSAALDCALKDYDVRVNTVHPGPIKTPRLDDLEGWEEMMSQRTLTPMGHIGEPNDIAWICVYLASDESKFATGAEFVVDGGWTAQ

SEQ ID NO: 65 - DNA, 756 bp, Artificial Sequence
  Engineered Variant of Kred from Lactobacillus kefir
atgaccgatcgtctgaagcataaagtagccatcattaccggcgggacactgggtatcggtttggcaatcgccgataaatttgtagaggagggtgcgaaagtagttattactggtcgtcacgcggatgtaggtgaaaaggccgccaaatcaatcggcggcactgatgttattcgctttgtccagcacgatgcgtccgaagaagcaggctggacgaaactgttcgacaccaccgaggaggcattcggcccggttacgaccgtcgtgaacaatgcagggattggggttattaaaagcgttgaagacactaccacggaggaatggcgtaaactgctgtccgttaatctggatggtgtttttttcggcacccgtctgggcattcagcgcatgaaaaataaaggcttgggcgctagcatcatcaatatgagcagtattctggggctcgtaggcgatccgacgctgggggcatacaacgcttccaagggggcggtacgtatcatgtcgaaaagcgcagcgctggattgcgcactgaaggactacgatgtgcgtgtcaacacagtacatccgggccccatcaagaccccgcggctcgatgatctggaaggttgggaggaaatgatgtcacagcgtacgttaacccctatgggccacattggcgaaccgaatgacatcgcatggatctgtgtgtacctggcatctgacgaatcgaaatttgcgacgggtgcagaatttgtggtcgacggcgggtggaccgcacag

SEQ ID NO: 66 - protein, 252 aa, Artificial Sequence
  Engineered Variant of Kred from Lactobacillus kefir
MTDRLKHKVAIITGGTLGIGLAIADKFVEEGAKVVITGRHADVGEKAAKSIGGTDVIRFVQHDASEEAGWTKLFDTTEEAFGPVTTVVNNAGIGVIKSVEDTTTEEWRKLLSVNLDGVFFGTRLGIQRMKNKGLGASIINMSSILGLVGDPTLGAYNASKGAVRIMSKSAALDCALKDYDVRVNTVHPGPIKTPRLDDLEGWEEMMSQRTLTPMGHIGEPNDIAWICVYLASDESKFATGAEFVVDGGWTAQ

SEQ ID NO: 67 - DNA, 756 bp, Artificial Sequence
  Engineered Variant of Kred from Lactobacillus kefir
atgaccgatcgtctgaagcataaagtagccatcgtaaccggcgggacactgggtatcggtttggcaatcgccgataaatttgtagaggagggtgcgaaagtagttattactggtcgtcacgcggatgtaggtgaaaaggccgccaaatcaatcggcggcactgatgttattcgctttgtccagcacgatgcgtccgaagaagcaggctggacgaaactgttcgacaccaccgaggaggcattcggcccggttacgaccgtcgtgaacaatgcagggattggggttattgggagcgttgaagacactaccacggaggaatggcgtaaactgctgtccgttaatctggatggtgtttttttcggcacccgtctgggcattcagcgcatgaaaaataaaggcttgggcgctagcatcatcaatatgagcagtattctggggctcgtaggcgatccgacgctgggggcatacaacgcttccaagggggcggtacgtatcatgtcgaaaagcgcagcgctggattgcgcactgaaggactacgatgtgcgtgtcaacacagtacatccgggccccatcaagaccccgcggctcgatgatctggaaggttgggaggaaatgatgtcacagcgtacgttaacccctatgggccacattggcgaaccgaatgacatcgcatggatctgtgtgtacctggcatctgacgaatcgaaatttgcgacgggtgcagaatttgtggtcgacggcgggtggaccgcacag

SEQ ID NO: 68 - protein, 252 aa, Artificial Sequence
  Engineered Variant of Kred from Lactobacillus kefir
MTDRLKHKVAIVTGGTLGIGLAIADKFVEEGAKVVITGRHADVGEKAAKSIGGTDVIRFVQHDASEEAGWTKLFDTTEEAFGPVTTVVNNAGIGVIGSVEDTTTEEWRKLLSVNLDGVFFGTRLGIQRMKNKGLGASIINMSSILGLVGDPTLGAYNASKGAVRIMSKSAALDCALKDYDVRVNTVHPGPIKTPRLDDLEGWEEMMSQRTLTPMGHIGEPNDIAWICVYLASDESKFATGAEFVVDGGWTAQ

SEQ ID NO: 69 - DNA, 756 bp, Artificial Sequence
  Engineered Variant of Kred from Lactobacillus kefir
atgaccgatcgtctgaagcataaagtagccatcgtaaccggcgggacactgggtatcggtttggcaatcgccgataaatttgtagaggagggtgcgaaagtagttattactggtcgtcacgcggatgtaggtgaaaaggccgccaaatcaatcggcggcactgatgttattcgctttgtccagcacgatgcgtccgaagaagcaggctggacgaaactgttcgacaccaccgaggaggcattcggcccggttacgaccttggtgaacaatgcagggattggggttattaaaagcgttgaagacactaccacggaggaatggcgtaaactgctgtccgttaatctggatggtgtttttttcggcacccgtctgggcattcagcgcatgaaaaataaaggcttgggcgctagcatcatcaatatgagcagtattctggggctcgtaggcgatccgacgctgggggcatacaacgcttccaagggggcggtacgtatcatgtcgaaaagcgcagcgctggattgcgcactgaaggactacgatgtgcgtgtcaacacagtacatccgggccccatcaagaccccgcggctcgatgatctggaaggttgggaggaaatgatgtcacagcgtacgttaacccctatgggccacattggcgaaccgaatgacatcgcatggatctgtgtgtacctggcatctgacgaatcgaaatttgcgacgggtgcagaatttgtggtcgacggcgggtggaccgcacag

SEQ ID NO: 70 - protein, 252 aa, Artificial Sequence
  Engineered Variant of Kred from Lactobacillus kefir
MTDRLKHKVAIVTGGTLGIGLAIADKFVEEGAKVVITGRHADVGEKAAKSIGGTDVIRFVQHDASEEAGWTKLFDTTEEAFGPVTTLVNNAGIGVIKSVEDTTTEEWRKLLSVNLDGVFFGTRLGIQRMKNKGLGASIINMSSILGLVGDPTLGAYNASKGAVRIMSKSAALDCALKDYDVRVNTVHPGPIKTPRLDDLEGWEEMMSQRTLTPMGHIGEPNDIAWICVYLASDESKFATGAEFVVDGGWTAQ

SEQ ID NO: 71 - DNA, 756 bp, Artificial Sequence
  Engineered Variant of Kred from Lactobacillus kefir
atgaccgatcgtctgaagcataaagtagccatcattaccggcgggacactgggtatcggtttggcaatcgccgataaatttgtagaggagggtgcgaaagtagttattactggtcgtcacgcggatgtaggtgaaaaggccgccaaatcaatcggcggcactgatgttattcgctttgtccagcacgatgcgtccgaagaagcaggctggacgaaactgttcgacaccaccgaggaggcattcggcccggttacgaccgtcgtgaacaatgcagggattggggttattaaaagcgttgaagacactaccacggaggaatggcgtaaactgctgtccgttaatctggatggtgtttttttcggcacccgtctgggcattcagcgcatgaaaaataaaggcttgggcgctagcatcatcaatatgagcagtattatggggctcgtaggcgatccgactctgggggcatacaacgcttccaagggggcggtacgtatcatgtcgaaaagcgcagcgctggattgcgcactgaaggactacgatgtgcgtgtcaacacagtacatccgggccccatcaagaccccgcggaaggatgatctggaaggttgggaggaaatgatgtcacagcgtacgttaacccctatgggccacattggcgaaccgaatgacatcgcatggatctgtgtgtacctggcatctgacgaatcgaaatttgcgacgggtgcagaatttgtggtcgacggcgggtggaccgcacag

SEQ ID NO: 72 - protein, 252 aa, Artificial Sequence
  Engineered Variant of Kred from Lactobacillus kefir
MTDRLKHKVAIITGGTLGIGLAIADKFVEEGAKVVITGRHADVGEKAAKSIGGTDVIRFVQHDASEEAGWTKLFDTTEEAFGPVTTVVNNAGIGVIKSVEDTTTEEWRKLLSVNLDGVFFGTRLGIQRMKNKGLGASIINMSSIMGLVGDPTLGAYNASKGAVRIMSKSAALDCALKDYDVRVNTVHPGPIKTPRKDDLEGWEEMMSQRTLTPMGHIGEPNDIAWICVYLASDESKFATGAEFVVDGGWTAQ

SEQ ID NO: 73 - DNA, 756 bp, Artificial Sequence
  Engineered Variant of Kred from Lactobacillus kefir
atgaccgatcgtctgaagcataaagtagccatcgtaaccggcgggacactgggtatcggtttggcaatcgccgataaatttgtagaggagggtgcgaaagtagttattactggtcgtcacgcggatgtaggtgaaaaggccgccaaatcaatcggcggcactgatgttattcgctttgtccagcacgatgcgtccgaagaagcaggctggacgaaactgttcgacaccaccgaggaggcattcggcccggttacgaccgtggtgaacaatgcagggattggggttattaaaagcgttgaagacactaccacggaggaatggcgtaaactgctgtccgttaatctggatggtgtttttttcggcacccgtctgggcattcagcgcatgaaaaataaaggcttgggcgctagcatcatcaatatgagcagtattatggggctcgtaggcgatccgacgctgggggcatacaacgcttccaagggggcggtacgtatcatgtcgaaaagcgcagcgctggattgcgcactgaaggactacgatgtgcgtgtcaacacagtacatccgggccccatcaagaccccgcggaaggatgatctggaaggttgggaggaaatgatgtcacagcgtacgttaacccctatgggccacattggcgaaccgaatgacatcgcatggatctgtgtgtacctggcatctgacgaatcgaaatttgcgacgggtgcagaatttgtggtcgacggcgggtggaccgcacag

SEQ ID NO: 74 - protein, 252 aa, Artificial Sequence
  Engineered Variant of Kred from Lactobacillus kefir
MTDRLKHKVAIVTGGTLGIGLAIADKFVEEGAKVVITGRHADVGEKAAKSIGGTDVIRFVQHDASEEAGWTKLFDTTEEAFGPVTTVVNNAGIGVIKSVEDTTTEEWRKLLSVNLDGVFFGTRLGIQRMKNKGLGASIINMSSIMGLVGDPTLGAYNASKGAVRIMSKSAALDCALKDYDVRVNTVHPGPIKTPRKDDLEGWEEMMSQRTLTPMGHIGEPNDIAWICVYLASDESKFATGAEFVVDGGWTAQ

SEQ ID NO: 75 - DNA, 756 bp, Artificial Sequence
  Engineered Variant of Kred from Lactobacillus kefir
atgaccgatcgtctgaagcataaagtagccatcgttaccggcgggacactgggtatcggtttggcaatcgccgataaatttgtagaggagggtgcgaaagtagttattactggtcgtcacgcggatgtaggtgaaaaggccgccaaatcaatcggcggcactgatgttattcgctttgtccagcacgatgcgtccgaagaagcaggctggacgaaactgttcgacaccaccgaggaggcattcggcccggttacgaccctggtgaacaatgcagggattggggttattaaaagcgttgaagacactaccacggaggaatggcgtaaaatcctgtccgttaatctggatggtgtttttttcggcacccgtctgggcattcagcgcatgaaaaataaaggcttgggcgctagcatcatcaatatgagcagtattatggggctcgtaggcgatccgactctgggggcatacaacgcttccaagggggcggtacgtatcatgtcgaaaagcgcagcgctggattgcgcactgaaggactacgatgtgcgtgtcaacacagtacatccgggccccatcaagacccctcggaaagatgatctggaaggttgggaggaaatgatgtcacagcgtacgttaacccctatgggccacattggcgaaccgaatgacatcgcatggatctgtgtgtacctggcatctgacgaatcgaaatttgcgacgggtgcagaatttgtggtcgacggcgggtggaccgcacag

SEQ ID NO: 76 - protein, 252 aa, Artificial Sequence
  Engineered Variant of Kred from Lactobacillus kefir
MTDRLKHKVAIVTGGTLGIGLAIADKFVEEGAKVVITGRHADVGEKAAKSIGGTDVIRFVQHDASEEAGWTKLFDTTEEAFGPVTTLVNNAGIGVIKSVEDTTTEEWRKILSVNLDGVFFGTRLGIQRMKNKGLGASIINMSSIMGLVGDPTLGAYNASKGAVRIMSKSAALDCALKDYDVRVNTVHPGPIKTPRKDDLEGWEEMMSQRTLTPMGHIGEPNDIAWICVYLASDESKFATGAEFVVDGGWTAQ

SEQ ID NO: 77 - DNA, 756 bp, Artificial Sequence
  Engineered Variant of Kred from Lactobacillus kefir
atgaccgatcgtctgaagcataaagtagccatcgttaccggcgggacactgggtatcggtttggcaatcgccgataaatttgtagaggagggtgcgaaagtagttattactggtcgtcacgcggatgtaggtgaaaaggccgccaaatcaatcggcggcactgatgttattcgctttgtccagcacgatgcgtccgaagaagcaggctggacgaaactgttcgacaccaccgaggaggcattcggcccggttacgaccgtcgtgaacaatgcagggattggggttattaaaagcgttgaagacactaccacggaggaatggcgtaaactgctgtccgttaatctggatggtgtttttttcggcacccgtctgggcattcagcgcatgaaaaataaaggcttgggcgctagcatcatcaatatgagcagtattatggggctcgtaggcgatccgggcctgggggcatacaacgcttccaagggggcggtacgtatcatgtcgaaaagcgcagcgctggattgcgcactgaaggactacgatgtgcgtgtcaacacagtacatccgggccccatcaagaccccgcggaaggatgatctggaaggttgggaggaaatgatgtcacagcgtacgttaacccctatgggccacattggcgaaccgaatgacatcgcatggatctgtgtgtacctggcatctgacgaatcgaaatttgcgacgggtgcagaatttgtggtcgacggcgggtggaccgcacag

SEQ ID NO: 78 - protein, 252 aa, Artificial Sequence
  Engineered Variant of Kred from Lactobacillus kefir
MTDRLKHKVAIVTGGTLGIGLAIADKFVEEGAKVVITGRHADVGEKAAKSIGGTDVIRFVQHDASEEAGWTKLFDTTEEAFGPVTTVVNNAGIGVIKSVEDTTTEEWRKLLSVNLDGVFFGTRLGIQRMKNKGLGASIINMSSIMGLVGDPGLGAYNASKGAVRIMSKSAALDCALKDYDVRVNTVHPGPIKTPRKDDLEGWEEMMSQRTLTPMGHIGEPNDIAWICVYLASDESKFATGAEFVVDGGWTAQ

SEQ ID NO: 79 - DNA, 756 bp, Artificial Sequence
  Engineered Variant of Kred from Lactobacillus kefir
atgaccgatcgtctgaagcataaagtagccatcgttaccggcgggacactgggtatcggtttggcaatcgccgataaatttgtagaggagggtgcgaaagtagttattactggtcgtcacgcggatgtaggtgaaaaggccgccaaatcaatcggcggcactgatgttattcgctttgtccagcacgatgcgtccgaagaagcaggctggacgaaactgttcgacaccaccgaggaggcattcggcccggttacgaccctggtgaacaatgcagggattggggttattaaaagcgttgaagacactaccacggaggaatggcgtaaaatcctgtccgttaatctggatggtgtttttttcggcacccgtctgggcattcagcgcatgaaaaataaaggcttgggcgctagcatcatcaatatgagcagtattatggggctcgtaggcgatccgactctgggggcatacaacgcttccaagggggcggtacgtatcatgtcgaaaagcgcagcgctggattgcgcactgaaggactacgatgtgcgtgtcaacacagtacatccgggccccatcaagaccccgcggaaggatgatctggaaggttgggaggaaatgatgtcacagcgtacgttaacccctatgggccacattggcgaaccgaatgacatcgcatggatctgtgtgtacctggcatctgacgaatcgaaatttgcgacgggtgcagaatttgtggtcgacggcgggtggaccgcacag

SEQ ID NO: 80 - protein, 252 aa, Artificial Sequence; identical to SEQ ID NO: 76
  Engineered Variant of Kred from Lactobacillus kefir

SEQ ID NO: 81 - DNA, 756 bp, Artificial Sequence
  Engineered Variant of Kred from Lactobacillus kefir
atgaccgatcgtctgaagcataaagtagccatcattaccggcgggacactgggtatcggtttggcaatcgccgataaatttgtagaggagggtgcgaaagtagttattactggtcgtcacgcggatgtaggtgaaaaggccgccaaatcaatcggcggcactgatgttattcgctttgtccagcacgatgcgtccgaagaagcaggctggacgaaactgttcgacaccaccgaggaggcattcggcccggttacgaccgtggtgaacaatgcagggattggggttattaaaagcgttgaagacactaccacggaggaatggcgtaaaatcctgtccgttaatctggatggtgtttttttcggcacccgtctgggcattcagcgcatgaaaaataaaggcttgggcgctagcatcatcaatatgagcagtattatggggctcgtaggcgatccgggcctgggggcatacaacgcttccaagggggcggtacgtatcatgtcgaaaagcgcagcgctggattgcgcactgaaggactacgatgtgcgtgtcaacacagtacatccgggccccatcaagaccccgcggaaggatgatctggaaggttgggaggaaatgatgtcacagcgtacgttaacccctatgggccacattggcgaaccgaatgacatcgcatggatctgtgtgtacctggcatctgacgaatcgaaatttgcgacgggtgcagaatttgtggtcgacggcgggtggaccgcacag

SEQ ID NO: 82 - protein, 252 aa, Artificial Sequence
  Engineered Variant of Kred from Lactobacillus kefir
MTDRLKHKVAIITGGTLGIGLAIADKFVEEGAKVVITGRHADVGEKAAKSIGGTDVIRFVQHDASEEAGWTKLFDTTEEAFGPVTTVVNNAGIGVIKSVEDTTTEEWRKILSVNLDGVFFGTRLGIQRMKNKGLGASIINMSSIMGLVGDPGLGAYNASKGAVRIMSKSAALDCALKDYDVRVNTVHPGPIKTPRKDDLEGWEEMMSQRTLTPMGHIGEPNDIAWICVYLASDESKFATGAEFVVDGGWTAQ

SEQ ID NO: 83 - DNA, 756 bp, Artificial Sequence
  Engineered Variant of Kred from Lactobacillus kefir
atgaccgatcgtctgaagcataaagtagccatcgttaccggcgggacactgggtatcggtttggcaatcgccgataaatttgtagaggagggtgcgaaagtagttattactggtcgtcacgcggatgtaggtgaaaaggccgccaaatcaatcggcggcactgatgttattcgctttgtccagcacgatgcgtccgaagaagcaggctggacgaaactgttcgacaccaccgaggaggcattcggcccggttacgaccgtggtgaacaatgcagggattggggttattaaaagcgttgaagacactaccacggaggaatggcgtaaaatcctgtccgttaatctggatggtgtttttttcggcacccgtctgggcattcagcgcatgaaaaataaaggcttgggcgctagcatcatcaatatgagcagtattatggggctcgtaggcgatccgactctgggggcatacaacgcttccaagggggcggtacgtatcatgtcgaaaagcgcagcgctggattgcgcactgaaggactacgatgtgcgtgtcaacacagtacatccgggccccatcaagacccatcggaaagatgatctggaaggttgggaggaaatgatgtcacagcgtacgttaacccctatgggccacattggcgaaccgaatgacatcgcatggatctgtgtgtacctggcatctgacgaatcgaaatttgcgacgggtgcagaatttgtggtcgacggcgggtggaccgcacag

SEQ ID NO: 84 - protein, 252 aa, Artificial Sequence
  Engineered Variant of Kred from Lactobacillus kefir
MTDRLKHKVAIVTGGTLGIGLAIADKFVEEGAKVVITGRHADVGEKAAKSIGGTDVIRFVQHDASEEAGWTKLFDTTEEAFGPVTTVVNNAGIGVIKSVEDTTTEEWRKILSVNLDGVFFGTRLGIQRMKNKGLGASIINMSSIMGLVGDPTLGAYNASKGAVRIMSKSAALDCALKDYDVRVNTVHPGPIKTHRKDDLEGWEEMMSQRTLTPMGHIGEPNDIAWICVYLASDESKFATGAEFVVDGGWTAQ

SEQ ID NO: 85 - DNA, 756 bp, Artificial Sequence
  Engineered Variant of Kred from Lactobacillus kefir
atgaccgatcgtctgaagcataaagtagccatcgttaccggcgggacactgggtatcggtttggcaatcgccgataaatttgtagaggagggtgcgaaagtagttattactggtcgtcacgcggatgtaggtgaaaaggccgccaaatcaatcggcggcactgatgttattcgctttgtccagcacgatgcgtccgaagaagcaggctggacgaaactgttcgacaccaccgaggaggcattcggcccggttacgaccgtggtgaacaatgcagggattggggttattaaaagcgttgaagacactaccacggaggaatggcgtaaaatcctgtccgttaatctggatggtgtttttttcggcacccgtctgggcatacagcgcatgaaaaataaaggcttgggcgctagcatcatcaatatgagcagtattatggggctcgtaggcgatccgggcctgggggcatacaacgcttccaagggggcggtacgtatcatgtcgaaaagcgcagcgctggattgcgcactgaaggactacgatgtgcgtgtcaacacagtacatccgggccccatcaagacccctcggaaaggtgatctggaaggttgggaggaaatgatgtcacagcgtacgttaacccctatgggccacattggcgaaccgaatgacatcgcatggatctgtgtgtacctggcatctgacgaatcgaaatttgcgacgggtgcagaatttgtggtcgacggcgggtggaccgcacag

SEQ ID NO: 86 - protein, 252 aa, Artificial Sequence
  Engineered Variant of Kred from Lactobacillus kefir
MTDRLKHKVAIVTGGTLGIGLAIADKFVEEGAKVVITGRHADVGEKAAKSIGGTDVIRFVQHDASEEAGWTKLFDTTEEAFGPVTTVVNNAGIGVIKSVEDTTTEEWRKILSVNLDGVFFGTRLGIQRMKNKGLGASIINMSSIMGLVGDPGLGAYNASKGAVRIMSKSAALDCALKDYDVRVNTVHPGPIKTPRKGDLEGWEEMMSQRTLTPMGHIGEPNDIAWICVYLASDESKFATGAEFVVDGGWTAQ

SEQ ID NO: 87 - DNA, 756 bp, Artificial Sequence
  Engineered Variant of Kred from Lactobacillus kefir
atgaccgatcgtctgaagcataaagtagccatcgtaaccggcgggacactgggtatcggtttggcaatcgccgataaatttgtagaggagggtgcgaaagtagttattactggtcgtcacgcggatgtaggtgaaaaggccgccaaatcaatcggcggcactgatgttattcgctttgtccagcacgatgcgtccgaagaagcaggctggacgaaactgttcgacaccaccgaggaggcattcggcccggttacgaccctggtgaacaatgcagggattggggttattaaaagcgttgaagacactaccacggaggaatggcgtaaaatcctgtccgttaatctggatggtgtttttttcggcacccgtctgggcattcagcgcatgaaaaataaaggcttgggcgctagcatcatcaatatgagcagtattatggggctcgtaggcgatccgactctgggggcatacaacgcttccaagggggcggtacgtatcatgtcgaaaagcgcagcgctggattgcgcactgaaggactacgatgtgcgtgtcaacacagtacatccgggccccatcaagaccaaccggaaagatgatctggaaggttgggaggaaatgatgtcacagcgtacgttaacccctatgggccacattggcgaaccgaatgacatcgcatggatctgtgtgtacctggcatctgacgaatcgaaatttgcgacgggtgcagaatttgtggtcgacggcgggtggaccgcacag

SEQ ID NO: 88 - protein, 252 aa, Artificial Sequence
  Engineered Variant of Kred from Lactobacillus kefir
MTDRLKHKVAIVTGGTLGIGLAIADKFVEEGAKVVITGRHADVGEKAAKSIGGTDVIRFVQHDASEEAGWTKLFDTTEEAFGPVTTLVNNAGIGVIKSVEDTTTEEWRKILSVNLDGVFFGTRLGIQRMKNKGLGASIINMSSIMGLVGDPTLGAYNASKGAVRIMSKSAALDCALKDYDVRVNTVHPGPIKTNRKDDLEGWEEMMSQRTLTPMGHIGEPNDIAWICVYLASDESKFATGAEFVVDGGWTAQ

SEQ ID NO: 89 - DNA, 756 bp, Artificial Sequence
  Engineered Variant of Kred from Lactobacillus kefir
atgaccgatcgtctgaagcataaagtagccatcgttaccggcgggacactgggtatcggtttggcaatcgccgataaatttgtagaggagggtgcgaaagtagttattactggtcgtcacgcggatgtaggtgaaaaggccgccaaatcaatcggcggcactgatgttattcgctttgtccagcacgatgcgtccgaagaagcaggctggacgaaactgttcgacaccaccgaggaggcattcggcccggttacgaccctggtgaacaatgcagggattggggttattaaaagcgttgaagacactaccacggaggaatggcgtaaaatcctgtccgttaatctggatggtgtttttttcggcacccgtctgggcattcagcgcatgaaaaataaaggcttgggcgctagcatcatcaatatgagcagtattatggggctcgtaggcgatccgactctgggggcatacaacgcttccaagggggcggtacgtatcatgtcgaaaagcgcagcgctggattgcgcactgaaggactacgatgtgcgtgtcaacacagtacatccgggccccatcaagacccatcggaaagatgatctggaaggttgggaggaaatgatgtcacagcgtacgttaacgcctatgggccacattggcgaaccgaatgacatcgcatggatctgtgtgtacctggcatctgacgaatcgaaatttgcgacgggtgcagaatttgtggtcgacggcgggtggaccgcacag

SEQ ID NO: 90 - protein, 252 aa, Artificial Sequence
  Engineered Variant of Kred from Lactobacillus kefir
MTDRLKHKVAIVTGGTLGIGLAIADKFVEEGAKVVITGRHADVGEKAAKSIGGTDVIRFVQHDASEEAGWTKLFDTTEEAFGPVTTLVNNAGIGVIKSVEDTTTEEWRKILSVNLDGVFFGTRLGIQRMKNKGLGASIINMSSIMGLVGDPTLGAYNASKGAVRIMSKSAALDCALKDYDVRVNTVHPGPIKTHRKDDLEGWEEMMSQRTLTPMGHIGEPNDIAWICVYLASDESKFATGAEFVVDGGWTAQ

SEQ ID NO: 91 - DNA, 756 bp, Artificial Sequence
  Engineered Variant of Kred from Lactobacillus kefir
atgaccgatcgtctgaagcataaagtagccatcgtaaccggcgggacactgggtatcggtttggcaatcgccgataaatttgtagaggagggtgcgaaagtagttattactggtcgtcacgcggatgtaggtgaaaaggccgccaaatcaatcggcggcactgatgttattcgctttgtccagcacgatgcgtccgaagaagcaggctggacgaaactgttcgacaccaccgaggaggcattcggcccggttacgaccgtcgtgaacaatgcagggattggggttattaaaagcgttgaagacactaccacggaggaatggcgtaaactgctgtccgttaatctggatggtgtttttttcggcacccgtctgggcattcagcgcatgaaaaataaaggcttgggcgctagcatcatcaatatgagcagtattctggggctcgtaggcgatccgagcctgggggcatacaacgcttccaagggggcggtacgtatcatgtcgaaaagcgcagcgctggattgcgcactgaaggactacgatgtgcgtgtcaacacagtacatccgggccccatcaagaccccgcggaaggatgatctggaaggttgggaggaaatgatgtcacagcgtacgttaacccctatgggccacattggcgaaccgaatgacatcgcatggatctgtgtgtacctggcatctgacgaatcgaaatttgcgacgggtgcagaatttgtggtcgacggcgggtggaccgcacag

SEQ ID NO: 92 - protein, 252 aa, Artificial Sequence
  Engineered Variant of Kred from Lactobacillus kefir
MTDRLKHKVAIVTGGTLGIGLAIADKFVEEGAKVVITGRHADVGEKAAKSIGGTDVIRFVQHDASEEAGWTKLFDTTEEAFGPVTTVVNNAGIGVIKSVEDTTTEEWRKLLSVNLDGVFFGTRLGIQRMKNKGLGASIINMSSILGLVGDPSLGAYNASKGAVRIMSKSAALDCALKDYDVRVNTVHPGPIKTPRKDDLEGWEEMMSQRTLTPMGHIGEPNDIAWICVYLASDESKFATGAEFVVDGGWTAQ

SEQ ID NO: 93 - DNA, 756 bp, Artificial Sequence
  Engineered Variant of Kred from Lactobacillus kefir
atgaccgatcgtctgaagcataaagtagccatcgttaccggcgggacactgggtatcggtttggcaatcgccgataaatttgtagaggagggtgcgaaagtagttattactggtcgtcacgcggatgtaggtgaaaaggccgccaaatcaatcggcggcactgatgttattcgctttgtccagcacgatgcgtccgaagaagcaggctggacgaaactgttcgacaccaccgaggaggcattcggcccggttacgaccgtggtgaacaatgcagggattggggttattaaaagcgttgaagacactaccacggaggaatggcgtaaactgctgtccgttaatctggatggtgtttttttcggcacccgtctgggcattcagcgcatgaaaaataaaggcttgggcgctagcatcatcaatatgagcagtattatggggctcgtaggcgatccgactctgggggcatacaacgcttccaagggggcggtacgtatcatgtcgaaaagcgcagcgctggattgcgcactgaaggactacgatgtgcgtgtcaacacagtacatccgggccccatcaagacccctcggaaaggtgatctggaaggttgggaggaaatgatgtcacagcgtacgttaacccctatgggccacattggcgaaccgaatgacatcgcatggctgtgtgtgtacctggcatctgacgaatcgaaatttgcgacgggtgcagaatttgtggtcgacggcgggtggaccgcacag

SEQ ID NO: 94 - protein, 252 aa, Artificial Sequence
  Engineered Variant of Kred from Lactobacillus kefir
MTDRLKHKVAIVTGGTLGIGLAIADKFVEEGAKVVITGRHADVGEKAAKSIGGTDVIRFVQHDASEEAGWTKLFDTTEEAFGPVTTVVNNAGIGVIKSVEDTTTEEWRKLLSVNLDGVFFGTRLGIQRMKNKGLGASIINMSSIMGLVGDPTLGAYNASKGAVRIMSKSAALDCALKDYDVRVNTVHPGPIKTPRKGDLEGWEEMMSQRTLTPMGHIGEPNDIAWLCVYLASDESKFATGAEFVVDGGWTAQ

SEQ ID NO: 95 - DNA, 756 bp, Artificial Sequence
  Engineered Variant of Kred from Lactobacillus kefir
atgaccgatcgtctgaagcataaagtagccatcgttaccggcgggacactgggtatcggtttggcaatcgccgataaatttgtagaggagggtgcgaaagtagttattactggtcgtcacgcggatgtaggtgaaaaggccgccaaatcaatcggcggcactgatgttattcgctttgtccagcacgatgcgtccgaagaagcaggctggacgaaactgttcgacaccaccgaggaggcattcggcccggttacgaccctggtgaacaatgcagggattggggttattaaaagcgttgaagacactaccacggaggaatggcgtaaactgctgtccgttaatctggatggtgtttttttcggcacccgtctgggcattcagcgcatgaaaaataaaggcttgggcgctagcatcatcaatatgagcagtattatggggctcgtaggcgatccgactctgggggcatacaacgcttccaagggggcggtacgtatcatgtcgaaaagcgcagcgctggattgcgcactgaaggactacgatgtgcgtgtcaacacagtacatccgggccccatcaagacccatcggaaagatgatctggaaggttgggaggaaatgatgtcacagcgtacgttaacccctatgggccacattggcgaaccgaatgacatcgcatggatctgtgtgtacctggcatctgacgaatcgaaatttgcgacgggtgcagaatttgtggtcgacggcgggtggaccgcacag

SEQ ID NO: 96 - protein, 252 aa, Artificial Sequence
  Engineered Variant of Kred from Lactobacillus kefir
MTDRLKHKVAIVTGGTLGIGLAIADKFVEEGAKVVITGRHADVGEKAAKSIGGTDVIRFVQHDASEEAGWTKLFDTTEEAFGPVTTLVNNAGIGVIKSVEDTTTEEWRKLLSVNLDGVFFGTRLGIQRMKNKGLGASIINMSSIMGLVGDPTLGAYNASKGAVRIMSKSAALDCALKDYDVRVNTVHPGPIKTHRKDDLEGWEEMMSQRTLTPMGHIGEPNDIAWICVYLASDESKFATGAEFVVDGGWTAQ

SEQ ID NO: 97 - DNA, 756 bp, Artificial Sequence
  Engineered Variant of Kred from Lactobacillus kefir
atgaccgatcgtctgaagcataaagtagccatcgttaccggcgggacactgggtatcggtttggcaatcgccgataaatttgtagaggagggtgcgaaagtagttattactggtcgtcacgcggatgtaggtgaaaaggccgccaaatcaatcggcggcactgatgttattcgctttgtccagcacgatgcgtccgaagaagcaggctggacgaaactgttcgacaccaccgaggaggcattcggcccggttacgaccgtggtgaacaatgcagggattggggttattaaaagcgttgaagacactaccacggaggaatggcgtaaaatcctgtccgttaatctggatggtgtttttttcggcacccgtctgggcattcagcgcatgaaaaataaaggcttgggcgctagcatcatcaatatgagcagtattctggggctcgtaggcgatccgactctgggggcatacaacgcttccaagggggcggtacgtatcatgtcgaaaagcgcagcgctggattgcgcactgaaggactacgatgtgcgtgtcaacacagtacatccgggccccatcaagacccctcggaaagatgatctggaaggttgggaggaaatgatgtcacagcgtacgttaacccctatgggccacattggcgaaccgaatgacatcgcatggatctgtgtgtacctggcatctgacgaatcgaaatttgcgacgggtgcagaatttgtggtcgacggcgggtggaccgcacag

SEQ ID NO: 98 - protein, 252 aa, Artificial Sequence
  Engineered Variant of Kred from Lactobacillus kefir
MTDRLKHKVAIVTGGTLGIGLAIADKFVEEGAKVVITGRHADVGEKAAKSIGGTDVIRFVQHDASEEAGWTKLFDTTEEAFGPVTTVVNNAGIGVIKSVEDTTTEEWRKILSVNLDGVFFGTRLGIQRMKNKGLGASIINMSSILGLVGDPTLGAYNASKGAVRIMSKSAALDCALKDYDVRVNTVHPGPIKTPRKDDLEGWEEMMSQRTLTPMGHIGEPNDIAWICVYLASDESKFATGAEFVVDGGWTAQ

SEQ ID NO: 99 - DNA, 756 bp, Artificial Sequence
  Engineered Variant of Kred from Lactobacillus kefir
atgaccgatcgtctgaagcataaagtagccatcgttaccggcgggacactgggtatcggtttggcaatcgccgataaatttgtagaggagggtgcgaaagtagttattactggtcgtcacgcggatgtaggtgaaaaggccgccaaatcaatcggcggcactgatgttattcgctttgtccagcacgatgcgtccgaagaagcaggctggacgaaactgttcgacaccaccgaggaggcattcggcccggttacgaccctggtgaacaatgcagggattggggttattaaaagcgttgaagacactaccacggaggaatggcgtaaaatcctgtccgttaatctggatggtgtttttttcggcacccgtctgggcattcagcgcatgaaaaataaaggcttgggcgctagcatcatcaatatgagcagtattatggggctcgtaggcgatccgactctgggggcatacaacgcttccaagggggcggtacgtatcatgtcgaaaagcgcagcgctggattgcgcactgaaggactacgatgtgcgtgtcaacacagtacatccgggccccatcaagaccccgcggaaggatgatctggaaggttgggaggaaatgatgtcacagcgtacgcgtacccctatgggccacattggcgaaccgaatgacatcgcatggatctgtgtgtacctggcatctgacgaatcgaaatttgcgacgggtgcagaatttgtggtcgacggcgggtggaccgcacag

SEQ ID NO: 100 - protein, 252 aa, Artificial Sequence
  Engineered Variant of Kred from Lactobacillus kefir
MTDRLKHKVAIVTGGTLGIGLAIADKFVEEGAKVVITGRHADVGEKAAKSIGGTDVIRFVQHDASEEAGWTKLFDTTEEAFGPVTTLVNNAGIGVIKSVEDTTTEEWRKILSVNLDGVFFGTRLGIQRMKNKGLGASIINMSSIMGLVGDPTLGAYNASKGAVRIMSKSAALDCALKDYDVRVNTVHPGPIKTPRKDDLEGWEEMMSQRTRTPMGHIGEPNDIAWICVYLASDESKFATGAEFVVDGGWTAQ

SEQ ID NO: 101 - DNA, 756 bp, Artificial Sequence
  Engineered Variant of Kred from Lactobacillus kefir
atgaccgatcgtctgaagcataaagtagccatcgttaccggcgggacaagtggtatcggtttggcaatcgccgataaatttgtagaggagggtgcgaaagtagttattactggtcgtcacgcggatgtaggtgaaaaggccgccaaatcaatcggcggcactgatgttattcgctttgtccagcacgatgcgtccgaagaagcaggctggacgaaactgttcgacaccaccgaggaggcattcggcccggttacgaccctggtgaacaatgcagggattggggttattaaaagcgttgaagacactaccacggaggaatggcgtaaaatcctgtccgttaatctggatggtgtttttttcggcacccgtctgggcattcagcgcatgaaaaataaaggcttgggcgctagcatcatcaatatgagcagtattatggggctcgtaggcgatccgactctgggggcatacaacgcttccaagggggcggtacgtatcatgtcgaaaagcgcagcgctggattgcgcactgaaggactacgatgtgcgtgtcaacacagtacatccgggccccatcaagaccccgcggaaggatgatctggaaggttgggaggaaatgatgtcacagcgtacgttaacccctatgggccacattggcgaaccgaatgacatcgcatggatctgtgtgtacctggcatctgacgaatcgaaatttgcgacgggtgcagaatttgtggtcgacggcgggtggaccgcacag

SEQ ID NO: 102 - protein, 252 aa, Artificial Sequence
  Engineered Variant of Kred from Lactobacillus kefir
MTDRLKHKVAIVTGGTSGIGLAIADKFVEEGAKVVITGRHADVGEKAAKSIGGTDVIRFVQHDASEEAGWTKLFDTTEEAFGPVTTLVNNAGIGVIKSVEDTTTEEWRKILSVNLDGVFFGTRLGIQRMKNKGLGASIINMSSIMGLVGDPTLGAYNASKGAVRIMSKSAALDCALKDYDVRVNTVHPGPIKTPRKDDLEGWEEMMSQRTLTPMGHIGEPNDIAWICVYLASDESKFATGAEFVVDGGWTAQ

SEQ ID NO: 103 - DNA, 756 bp, Artificial Sequence
  Engineered Variant of Kred from Lactobacillus kefir
atgaccgatcgtctgaagcataaagtagccatcgttaccggcgggacacagggtatcggtttggcaatcgccgataaatttgtagaggagggtgcgaaagtagttattactggtcgtcacgcggatgtaggtgaaaaggccgccaaatcaatcggcggcactgatgttattcgctttgtccagcacgatgcgtccgaagaagcaggctggacgaaactgttcgacaccaccgaggaggcattcggcccggttacgaccctggtgaacaatgcagggattggggttattaaaagcgttgaagacactaccacggaggaatggcgtaaaatcctgtccgttaatctggatggtgtttttttcggcacccgtctgggcattcagcgcatgaaaaataaaggcttgggcgctagcatcatcaatatgagcagtattatggggctcgtaggcgatccgactctgggggcatacaacgcttccaagggggcggtacgtatcatgtcgaaaagcgcagcgctggattgcgcactgaaggactacgatgtgcgtgtcaacacagtacatccgggccccatcaagaccccgcggaaggatgatctggaaggttgggaggaaatgatgtcacagcgtacgttaacccctatgggccacattggcgaaccgaatgacatcgcatggatctgtgtgtacctggcatctgacgaatcgaaatttgcgacgggtgcagaatttgtggtcgacggcgggtggaccgcacag

SEQ ID NO: 104 - protein, 252 aa, Artificial Sequence
  Engineered Variant of Kred from Lactobacillus kefir
MTDRLKHKVAIVTGGTQGIGLAIADKFVEEGAKVVITGRHADVGEKAAKSIGGTDVIRFVQHDASEEAGWTKLFDTTEEAFGPVTTLVNNAGIGVIKSVEDTTTEEWRKILSVNLDGVFFGTRLGIQRMKNKGLGASIINMSSIMGLVGDPTLGAYNASKGAVRIMSKSAALDCALKDYDVRVNTVHPGPIKTPRKDDLEGWEEMMSQRTLTPMGHIGEPNDIAWICVYLASDESKFATGAEFVVDGGWTAQ

SEQ ID NO: 105 - DNA, 756 bp, Artificial Sequence
  Engineered Variant of Kred from Lactobacillus kefir
atgaccgatcgtctgaagcataaagtagccatcgttaccggcgggacactgggtatcggtttggcaatcgccgataaatttgtagaggagggtgcgaaagtagttattactggtcgtcacgcggatgtaggtgaaaaggccgccaaatcaatcggcggcactgatgttattcgctttgtccagcacgatgcgtccgaagaagcaggctggacgaaactgttcgacaccaccgaggaggcattcggcccggttacgaccctggtgaacaatgcagggattggggttattaaaagcgttgaagacactaccacggaggaatggcgtaaaatcctgtccgttaatctggatggtgtttttttcggcacccgtctgggcattcagcgcatgaaaaataaaggcttgggcgctagcatcatcaatatgagcagtattatggggctcgtaggcgatccgactctgggggcatacaacgcttccaagggggcggtacgtatcatgtcgaaaagcgcagcgctggattgcgcactgaaggactacgatgtgcgtgtcaacacagtacatccgggccccatcaagaccccgcggaaggatgctctggaaggttgggaggaaatgatgtcacagcgtacgttaacccctatgggccacattggcgaaccgaatgacatcgcatggatctgtgtgtacctggcatctgacgaatcgaaatttgcgacgggtgcagaatttgtggtcgacggcgggtggaccgcacag

SEQ ID NO: 106 - protein, 252 aa, Artificial Sequence
  Engineered Variant of Kred from Lactobacillus kefir
MTDRLKHKVAIVTGGTLGIGLAIADKFVEEGAKVVITGRHADVGEKAAKSIGGTDVIRFVQHDASEEAGWTKLFDTTEEAFGPVTTLVNNAGIGVIKSVEDTTTEEWRKILSVNLDGVFFGTRLGIQRMKNKGLGASIINMSSIMGLVGDPTLGAYNASKGAVRIMSKSAALDCALKDYDVRVNTVHPGPIKTPRKDALEGWEEMMSQRTLTPMGHIGEPNDIAWICVYLASDESKFATGAEFVVDGGWTAQ

SEQ ID NO: 107 - DNA, 756 bp, Artificial Sequence
  Engineered Variant of Kred from Lactobacillus kefir
atgaccgatcgtctgaagcataaagtagccatcgttaccggcgggacactgggtatcggtttggcaatcgccgataaatttgtagaggagggtgcgaaagtagttattactggtcgtcacgcggatgtaggtgaaaaggccgccaaatcaatcggcggcactgatgttattcgctttgtccagcacgatgcgtccgaagaagcaggctggacgaaactgttcgacaccaccgaggaggcattcggcccggttacgaccctggtgaacaatgcagggattggggttattaaaagcgttgaagacactaccacggaggaatggcgtaaaatcctgtccgttaatctggatggtgtttttttcggcacccgtctgggcattcagcgcatgaaaaataaaggcttgggcgctagcatcatcaatatgagcagtattatggggctcgtaggcgatccgaagctgggggcatacaacgcttccaagggggcggtacgtatcatgtcgaaaagcgcagcgctggattgcgcactgaaggactacgatgtgcgtgtcaacacagtacatccgggccccatcaagaccccgcggaaggatgatctggaaggttgggaggaaatgatgtcacagcgtacgttaacccctatgggccacattggcgaaccgaatgacatcgcatggatctgtgtgtacctggcatctgacgaatcgaaatttgcgacgggtgcagaatttgtggtcgacggcgggtggaccgcacag

SEQ ID NO: 108 - protein, 252 aa, Artificial Sequence
  Engineered Variant of Kred from Lactobacillus kefir
MTDRLKHKVAIVTGGTLGIGLAIADKFVEEGAKVVITGRHADVGEKAAKSIGGTDVIRFVQHDASEEAGWTKLFDTTEEAFGPVTTLVNNAGIGVIKSVEDTTTEEWRKILSVNLDGVFFGTRLGIQRMKNKGLGASIINMSSIMGLVGDPKLGAYNASKGAVRIMSKSAALDCALKDYDVRVNTVHPGPIKTPRKDDLEGWEEMMSQRTLTPMGHIGEPNDIAWICVYLASDESKFATGAEFVVDGGWTAQ

SEQ ID NO: 109 - DNA, 756 bp, Artificial Sequence
  Engineered Variant of Kred from Lactobacillus kefir
atgaccgatcgtctgaagcataaagtagccatcgttaccggcgggacactgggtatcggtttggcaatcgccgataaatttgtagaggagggtgcgaaagtagttattactggtcgtcacgcggatgtaggtgaaaaggccgccaaatcaatcggcggcactgatgttattcgctttgtccagcacgatgcgtccgaagaagcaggctggacgaaactgttcgacaccaccgaggaggcattcggcccggttacgaccctggtgaacaatgcagggattggggttattaaaagcgttgaaacgactaccacggaggaatggcgtaaaatcctgtccgttaatctggatggtgtttttttcggcacccgtctgggcattcagcgcatgaaaaataaaggcttgggcgctagcatcatcaatatgagcagtattatggggctcgtaggcgatccgactctgggggcatacaacgcttccaagggggcggtacgtatcatgtcgaaaagcgcagcgctggattgcgcactgaaggactacgatgtgcgtgtcaacacagtacatccgggccccatcaagaccccgcggaaggatgatctggaaggttgggaggaaatgatgtcacagcgtacgttaacccctatgggccacattggcgaaccgaatgacatcgcatggatctgtgtgtacctggcatctgacgaatcgaaatttgcgacgggtgcagaatttgtggtcgacggcgggtggaccgcacag

SEQ ID NO: 110 - protein, 252 aa, Artificial Sequence
  Engineered Variant of Kred from Lactobacillus kefir
MTDRLKHKVAIVTGGTLGIGLAIADKFVEEGAKVVITGRHADVGEKAAKSIGGTDVIRFVQHDASEEAGWTKLFDTTEEAFGPVTTLVNNAGIGVIKSVETTTTEEWRKILSVNLDGVFFGTRLGIQRMKNKGLGASIINMSSIMGLVGDPTLGAYNASKGAVRIMSKSAALDCALKDYDVRVNTVHPGPIKTPRKDDLEGWEEMMSQRTLTPMGHIGEPNDIAWICVYLASDESKFATGAEFVVDGGWTAQ

SEQ ID NO: 111 - DNA, 756 bp, Artificial Sequence
  Engineered Variant of Kred from Lactobacillus kefir
atgaccgatcgtctgaagcataaagtagccatcgttaccggcgggacactgggtatcggtttggcaatcgccgataaatttgtagaggagggtgcgaaagtagttattactggtcgtcacgcggatgtaggtgaaaaggccgccaaatcaatcggcggcactgatgttattcgctttgtccagcacgatgcgtccgaagaagcaggctggacgaaactgttcgacaccaccgaggaggcattcggcccggttacgaccctggtgaacaatgcagggattggggttattaaaagcgttgaagacactaccacggaggaatggcgtaaagtgctgtccgttaatctggatggtgtttttttcggcacccgtctgggcattcagcgcatgaaaaataaaggcttgggcgctagcatcatcaatatgagcagtattatggggctcgtaggcgatccgactctgggggcatacaacgcttccaagggggcggtacgtatcatgtcgaaaagcgcagcgctggattgcgcactgaaggactacgatgtgcgtgtcaacacagtacatccgggccccatcaagaccccgcggaaggatgatctggaaggttgggaggaaatgatgtcacagcgtacgttaacccctatgggccacattggcgaaccgaatgacatcgcatggatctgtgtgtacctggcatctgacgaatcgaaatttgcgacgggtgcagaatttgtggtcgacggcgggtggaccgcacag

SEQ ID NO: 112 - protein, 252 aa, Artificial Sequence
  Engineered Variant of Kred from Lactobacillus kefir
MTDRLKHKVAIVTGGTLGIGLAIADKFVEEGAKVVITGRHADVGEKAAKSIGGTDVIRFVQHDASEEAGWTKLFDTTEEAFGPVTTLVNNAGIGVIKSVEDTTTEEWRKVLSVNLDGVFFGTRLGIQRMKNKGLGASIINMSSIMGLVGDPTLGAYNASKGAVRIMSKSAALDCALKDYDVRVNTVHPGPIKTPRKDDLEGWEEMMSQRTLTPMGHIGEPNDIAWICVYLASDESKFATGAEFVVDGGWTAQ

SEQ ID NO: 113 - DNA, 756 bp, Artificial Sequence
  Engineered Variant of Kred from Lactobacillus kefir
atgaccgatcgtctgaagcataaagtagccatcgttaccggcgggacactgggtatcggtttggcaatcgccgataaatttgtagaggagggtgcgaaagtagttattactggtcgtcacgcggatgtaggtgaaaaggccgccaaatcaatcggcggcactgatgttattcgctttgtccagcacgatgcgtccgaagaagcaggctggacgaaactgttcgacaccaccgaggaggcattcggcccggttacgaccctggtgaacaatgcagggattggggttattaaaagcgttgaatgtactaccacggaggaatggcgtaaaatcctgtccgttaatctggatggtgtttttttcggcacccgtctgggcattcagcgcatgaaaaataaaggcttgggcgctagcatcatcaatatgagcagtattatggggctcgtaggcgatccgactctgggggcatacaacgcttccaagggggcggtacgtatcatgtcgaaaagcgcagcgctggattgcgcactgaaggactacgatgtgcgtgtcaacacagtacatccgggccccatcaagaccccgcggaaggatgatctggaaggttgggaggaaatgatgtcacagcgtacgttaacccctatgggccacattggcgaaccgaatgacatcgcatggatctgtgtgtacctggcatctgacgaatcgaaatttgcgacgggtgcagaatttgtggtcgacggcgggtggaccgcacag

SEQ ID NO: 114 - protein, 252 aa, Artificial Sequence
  Engineered Variant of Kred from Lactobacillus kefir
MTDRLKHKVAIVTGGTLGIGLAIADKFVEEGAKVVITGRHADVGEKAAKSIGGTDVIRFVQHDASEEAGWTKLFDTTEEAFGPVTTLVNNAGIGVIKSVECTTTEEWRKILSVNLDGVFFGTRLGIQRMKNKGLGASIINMSSIMGLVGDPTLGAYNASKGAVRIMSKSAALDCALKDYDVRVNTVHPGPIKTPRKDDLEGWEEMMSQRTLTPMGHIGEPNDIAWICVYLASDESKFATGAEFVVDGGWTAQ

SEQ ID NO: 115 - DNA, 756 bp, Artificial Sequence
  Engineered Variant of Kred from Lactobacillus kefir
atgaccgatcgtctgaagcataaagtagccatcgttaccggcgggacactgggtatcggtttggcaatcgccgataaatttgtagaggagggtgcgaaagtagttattactggtcgtcacgcggatgtaggtgaaaaggccgccaaatcaatcggcggcactgatgttattcgctttgtccagcacgatgcgtccgaagaagcaggctggacgaaactgttcgacaccaccgaggaggcattcggcccggttacgaccctggtgaacaatgcagggattggggttattaaaagcgttgaagacactaccacggaggaatggcgtaaaatcctgtccgttaatctggatggtgtttttttcggcacccgtctgggcattcagcgcatgaaaaataaaggcttgggcgctagcatcatcaatatgagcagtattatggggctcgtaggcgatccgactctgggggcatacaacgcttccaagggggcggtacgtatcatgtcgaaaagcgcagcgctggattgcgcactgaaggactacgatgtgcgtgtcaacacagtacatccgggcgcgatcaagaccccgcggaaggatgatctggaaggttgggaggaaatgatgtcacagcgtacgttaacccctatgggccacattggcgaaccgaatgacatcgcatggatctgtgtgtacctggcatctgacgaatcgaaatttgcgacgggtgcagaatttgtggtcgacggcgggtggaccgcacag

SEQ ID NO: 116 - protein, 252 aa, Artificial Sequence
  Engineered Variant of Kred from Lactobacillus kefir
MTDRLKHKVAIVTGGTLGIGLAIADKFVEEGAKVVITGRHADVGEKAAKSIGGTDVIRFVQHDASEEAGWTKLFDTTEEAFGPVTTLVNNAGIGVIKSVEDTTTEEWRKILSVNLDGVFFGTRLGIQRMKNKGLGASIINMSSIMGLVGDPTLGAYNASKGAVRIMSKSAALDCALKDYDVRVNTVHPGAIKTPRKDDLEGWEEMMSQRTLTPMGHIGEPNDIAWICVYLASDESKFATGAEFVVDGGWTAQ

SEQ ID NO: 117 - DNA, 756 bp, Artificial Sequence
  Engineered Variant of Kred from Lactobacillus kefir
atgaccgatcgtctgaagcataaagtagccatcgttaccggcgggacactgggtatcggtttggcaatcgccgataaatttgtagaggagggtgcgaaagtagttattactggtcgtcacgcggatgtaggtgaaaaggccgccaaatcaatcggcggcactgattgtattcgctttgtccagcacgatgcgtccgaagaagcaggctggacgaaactgttcgacaccaccgaggaggcattcggcccggttacgaccctggtgaacaatgcagggattggggttattaaaagcgttgaagacactaccacggaggaatggcgtaaaatcctgtccgttaatctggatggtgtttttttcggcacccgtctgggcattcagcgcatgaaaaataaaggcttgggcgctagcatcatcaatatgagcagtattatggggctcgtaggcgatccgactctgggggcatacaacgcttccaagggggcggtacgtatcatgtcgaaaagcgcagcgctggattgcgcactgaaggactacgatgtgcgtgtcaacacagtacatccgggccccatcaagaccccgcggaaggatgatctggaaggttgggaggaaatgatgtcacagcgtacgttaacccctatgggccacattggcgaaccgaatgacatcgcatggatctgtgtgtacctggcatctgacgaatcgaaatttgcgacgggtgcagaatttgtggtcgacggcgggtggaccgcacag

SEQ ID NO: 118 - protein, 252 aa, Artificial Sequence
  Engineered Variant of Kred from Lactobacillus kefir
MTDRLKHKVAIVTGGTLGIGLAIADKFVEEGAKVVITGRHADVGEKAAKSIGGTDCIRFVQHDASEEAGWTKLFDTTEEAFGPVTTLVNNAGIGVIKSVEDTTTEEWRKILSVNLDGVFFGTRLGIQRMKNKGLGASIINMSSIMGLVGDPTLGAYNASKGAVRIMSKSAALDCALKDYDVRVNTVHPGPIKTPRKDDLEGWEEMMSQRTLTPMGHIGEPNDIAWICVYLASDESKFATGAEFVVDGGWTAQ

SEQ ID NO: 119 - DNA, 756 bp, Artificial Sequence
  Engineered Variant of Kred from Lactobacillus kefir
atgaccgatcgtctgaagcataaagtagccatcgttaccggcgggacactgggtatcggtttggcaatcgccgataaatttgtagaggagggtgcgaaagtagttattactggtcgtcacgcggatgtaggtgaaaaggccgccaaatcaatcggcggcactgatgttattcgctttgtccagcacgatgcgtccgaagaagcaggctggacgaaactgttcgacaccaccgaggaggcattcggcccggttacgaccctggtgaacaatgcagggattggggttattaaaagcgttgaagacactaccacggaggaatggcgtaaaatcctgtccgttaatctggatggtgtttttttcggcacccgtctgggcattcagcgcatgaaaaataaaggcttgggcgctagcatcatcaatatgagcagtattatggggctcgtaggcgatccgactctgggggcatacaacgcttccaaggggggtgtacgtatcatgtcgaaaagcgcagcgctggattgcgcactgaaggactacgatgtgcgtgtcaacacagtacatccgggccccatcaagaccccgcggaaggatgatctggaaggttgggaggaaatgatgtcacagcgtacgttaacccctatgggccacattggcgaaccgaatgacatcgcatggatctgtgtgtacctggcatctgacgaatcgaaatttgcgacgggtgcagaatttgtggtcgacggcgggtggaccgcacag

SEQ ID NO: 120 - protein, 252 aa, Artificial Sequence
  Engineered Variant of Kred from Lactobacillus kefir
MTDRLKHKVAIVTGGTLGIGLAIADKFVEEGAKVVITGRHADVGEKAAKSIGGTDVIRFVQHDASEEAGWTKLFDTTEEAFGPVTTLVNNAGIGVIKSVEDTTTEEWRKILSVNLDGVFFGTRLGIQRMKNKGLGASIINMSSIMGLVGDPTLGAYNASKGGVRIMSKSAALDCALKDYDVRVNTVHPGPIKTPRKDDLEGWEEMMSQRTLTPMGHIGEPNDIAWICVYLASDESKFATGAEFVVDGGWTAQ

SEQ ID NO: 121 - DNA, 756 bp, Artificial Sequence
  Engineered Variant of Kred from Lactobacillus kefir
atgaccgatcgtctgaagcataaagtagccatcgttaccggcgggacactgggtatcggtttggcaatcgccgataaatttgtagaggagggtgcgaaagtagttattactggtcgtcacgcggatgtaggtgaaaaggccgccaaatcaatcggcggcactgatgttattcgctttgtccagcacgatgcgtccgaagaagcaggctggacgaaactgttcgacaccaccgaggaggcattcggcccggttacgaccctggtgaacaatgcagggattgggattattaaaagcgttgaagacactaccacggaggaatggcgtaaaatcctgtccgttaatctggatggtgtttttttcggcacccgtctgggcattcagcgcatgaaaaataaaggcttgggcgctagcatcatcaatatgagcagtattatggggctcgtaggcgatccgactctgggggcatacaacgcttccaagggggcggtacgtatcatgtcgaaaagcgcagcgctggattgcgcactgaaggactacgatgtgcgtgtcaacacagtacatccgggccccatcaagaccccgcggaaggatgatctggaaggttgggaggaaatgatgtcacagcgtacgttaacccctatgggccacattggcgaaccgaatgacatcgcatggatctgtgtgtacctggcatctgacgaatcgaaatttgcgacgggtgcagaatttgtggtcgacggcgggtggaccgcacag

SEQ ID NO: 122 - protein, 252 aa, Artificial Sequence
  Engineered Variant of Kred from Lactobacillus kefir
MTDRLKHKVAIVTGGTLGIGLAIADKFVEEGAKVVITGRHADVGEKAAKSIGGTDVIRFVQHDASEEAGWTKLFDTTEEAFGPVTTLVNNAGIGIIKSVEDTTTEEWRKILSVNLDGVFFGTRLGIQRMKNKGLGASIINMSSIMGLVGDPTLGAYNASKGAVRIMSKSAALDCALKDYDVRVNTVHPGPIKTPRKDDLEGWEEMMSQRTLTPMGHIGEPNDIAWICVYLASDESKFATGAEFVVDGGWTAQ

SEQ ID NO: 123 - DNA, 756 bp, Artificial Sequence
  Engineered Variant of Kred from Lactobacillus kefir
atgaccgatcgtctgaagcataaagtagccatcgttaccggcgggacactgggtatcggtttggcaatcgccgataaatttgtagaggagggtgcgaaagtagttattactggtcgtcacgcggatgtaggtgaaaaggccgccaaatcaatcggcggcactgatgttattcgctttgtccagcacgatgcgtccgaagaagcaggctggacgaaactgttcgacaccaccgaggaggcattcggcccggttacgaccctggtgaacaatgcagggattggggttattaaaagcgttgaagacactaccacggaggaatggcgtaaaatcctgtccgttaatctggatggtgtttttttcggcacccgtctgggcattcagcgcatgaaaaataaaggcttgggcgctagcatcatcaatatgagcagtattatggggctcgtaggcgatccgactctgggggcatacaacgcttccaagggggcggtacgtatcatgtcgaaaagcgcagcgctggattgcgcactgaaggactacgatgtgcgtgtcaacacagtacatccgggccccatcaagaccccgcggaaggatgatctggaaggttgggaggaaatgatgtcacagcgttggttaacccctatgggccacattggcgaaccgaatgacatcgcatggatctgtgtgtacctggcatctgacgaatcgaaatttgcgacgggtgcagaatttgtggtcgacggcgggtggaccgcacag

SEQ ID NO: 124 - protein, 252 aa, Artificial Sequence
  Engineered Variant of Kred from Lactobacillus kefir
MTDRLKHKVAIVTGGTLGIGLAIADKFVEEGAKVVITGRHADVGEKAAKSIGGTDVIRFVQHDASEEAGWTKLFDTTEEAFGPVTTLVNNAGIGVIKSVEDTTTEEWRKILSVNLDGVFFGTRLGIQRMKNKGLGASIINMSSIMGLVGDPTLGAYNASKGAVRIMSKSAALDCALKDYDVRVNTVHPGPIKTPRKDDLEGWEEMMSQRWLTPMGHIGEPNDIAWICVYLASDESKFATGAEFVVDGGWTAQ

SEQ ID NO: 125 - DNA, 756 bp, Artificial Sequence
  Engineered Variant of Kred from Lactobacillus kefir
atgaccgatcgtctgaagcataaagtagccatcgttaccggcgggacactgggtatcggtttggcaatcgccgataaatttgtagaggagggtgcgaaagtagttattactggtcgtcacgcggatgtaggtgaaaaggccgccaaatcaatcggcggcactgatgttattcgctttgtccagcacgatgcgtccgaagaagcaggctggacgaaactgttcgacaccaccgaggaggcattcggcccggttacgaccctggtgaacaatgcagggattggggttattaaaagcgttgaagacactaccacggaggaatggcgtaaaatcctgtccgttaatctggatggtgtttttttcggcacccgtctgggcattcagcgcatgaaaaataaaggcttgggcgctagcatcatcaatatgagcagtattatggggctcgtaggcgatccgactctgggggcatacaacgcttccaagggggcggtacgtatcatgtcgaaaagcgcagcgctggattgcgcactgaaggactacgatgtgcgtgtcaacacagtacatccgggccccatcaagaccccgcggaaggatgatctggaaggttgggaggaaatgatgtcacagcgttttttaacccctatgggccacattggcgaaccgaatgacatcgcatggatctgtgtgtacctggcatctgacgaatcgaaatttgcgacgggtgcagaatttgtggtcgacggcgggtggaccgcacag

SEQ ID NO: 126 - protein, 252 aa, Artificial Sequence
  Engineered Variant of Kred from Lactobacillus kefir
MTDRLKHKVAIVTGGTLGIGLAIADKFVEEGAKVVITGRHADVGEKAAKSIGGTDVIRFVQHDASEEAGWTKLFDTTEEAFGPVTTLVNNAGIGVIKSVEDTTTEEWRKILSVNLDGVFFGTRLGIQRMKNKGLGASIINMSSIMGLVGDPTLGAYNASKGAVRIMSKSAALDCALKDYDVRVNTVHPGPIKTPRKDDLEGWEEMMSQRFLTPMGHIGEPNDIAWICVYLASDESKFATGAEFVVDGGWTAQ

SEQ ID NO: 127 - DNA, 756 bp, Artificial Sequence
  Engineered Variant of Kred from Lactobacillus kefir
atgaccgatcgtctgaagcataaagtagccatcgttaccggcgggacactgggtatcggtgctgcaatcgccgataaatttgtagaggagggtgcgaaagtagttattactggtcgtcacgcggatgtaggtgaaaaggccgccaaatcaatcggcggcactgatgttattcgctttgtccagcacgatgcgtccgaagaagcaggctggacgaaactgttcgacaccaccgaggaggcattcggcccggttacgaccctggtgaacaatgcagggattggggttattaaaagcgttgaagacactaccacggaggaatggcgtaaaatcctgtccgttaatctggatggtgtttttttcggcacccgtctgggcattcagcgcatgaaaaataaaggcttgggcgctagcatcatcaatatgagcagtattatggggctcgtaggcgatccgactctgggggcatacaacgcttccaagggggcggtacgtatcatgtcgaaaagcgcagcgctggattgcgcactgaaggactacgatgtgcgtgtcaacacagtacatccgggccccatcaagaccccgcggaaggatgatctggaaggttgggaggaaatgatgtcacagcgtacgttaacccctatgggccacattggcgaaccgaatgacatcgcatggatctgtgtgtacctggcatctgacgaatcgaaatttgcgacgggtgcagaatttgtggtcgacggcgggtggaccgcacag

SEQ ID NO: 128 - protein, 252 aa, Artificial Sequence
  Engineered Variant of Kred from Lactobacillus kefir
MTDRLKHKVAIVTGGTLGIGAAIADKFVEEGAKVVITGRHADVGEKAAKSIGGTDVIRFVQHDASEEAGWTKLFDTTEEAFGPVTTLVNNAGIGVIKSVEDTTTEEWRKILSVNLDGVFFGTRLGIQRMKNKGLGASIINMSSIMGLVGDPTLGAYNASKGAVRIMSKSAALDCALKDYDVRVNTVHPGPIKTPRKDDLEGWEEMMSQRTLTPMGHIGEPNDIAWICVYLASDESKFATGAEFVVDGGWTAQ

SEQ ID NO: 129 - DNA, 756 bp, Artificial Sequence
  Engineered Variant of Kred from Lactobacillus kefir
atgaccgatcgtctgaagcataaagtagccatcgttaccggcgggacactgggtatcggtttggcaatcgccgataaatttgtagaggagggtgcgaaagtagttattactggtcgtcacgcggatgtaggtgaaaaggccgccaaatcaatcggcggcactgatgttattcgctttgtccagcacgatgcgtccgaagaagcaggctggacgaaactgttcgacaccaccgaggaggcattcggcccggttacgaccctggtgaacaatgcagggattggggttattaaaagcgttgaagacactaccacggaggaatggcgtaaaatcctgtccgttaatctggatggtgtttttttcggcacccgtctgggcattcagcgcatgaaaaataaaggcttgggcgctagcatcatcaatatgagcagtattatggggctcgtaggcgatccgactctgggggcatacaacgcttccaagggggcggtacgtatcatgtcgaaaagcgcagcgctggattgcgcactgaaggactacgatgtgcgtgtcaacacagtacatccgggccccatcaagaccccgcggaaggatgatctggaaggttgggaggaaatgatgtcacagcgtacgttaacccctatgggccacattggcgaaccgaatgacatcgcatggatcgttgtgtacctggcatctgacgaatcgaaatttgcgacgggtgcagaatttgtggtcgacggcgggtggaccgcacag

SEQ ID NO: 130 - protein, 252 aa, Artificial Sequence
  Engineered Variant of Kred from Lactobacillus kefir
MTDRLKHKVAIVTGGTLGIGLAIADKFVEEGAKVVITGRHADVGEKAAKSIGGTDVIRFVQHDASEEAGWTKLFDTTEEAFGPVTTLVNNAGIGVIKSVEDTTTEEWRKILSVNLDGVFFGTRLGIQRMKNKGLGASIINMSSIMGLVGDPTLGAYNASKGAVRIMSKSAALDCALKDYDVRVNTVHPGPIKTPRKDDLEGWEEMMSQRTLTPMGHIGEPNDIAWIVVYLASDESKFATGAEFVVDGGWTAQ

SEQ ID NO: 131 - DNA, 756 bp, Artificial Sequence
  Engineered Variant of Kred from Lactobacillus kefir
atgaccgatcgtctgaagcataaagtagccatcgttaccggcgggacactgggtatcggtttggcaatcgccgataaatttgtagaggagggtgcgaaagtagttattactggtcgtcacgcggatgtaggtgaagtggccgccaaatcaatcggcggcactgatgttattcgctttgtccagcacgatgcgtccgaagaagcaggctggacgaaactgttcgacaccaccgaggaggcattcggcccggttacgaccctggtgaacaatgcagggattggggttattaaaagcgttgaagacactaccacggaggaatggcgtaaaatcctgtccgttaatctggatggtgtttttttcggcacccgtctgggcattcagcgcatgaaaaataaaggcttgggcgctagcatcatcaatatgagcagtattatggggctcgtaggcgatccgactctgggggcatacaacgcttccaagggggcggtacgtatcatgtcgaaaagcgcagcgctggattgcgcactgaaggactacgatgtgcgtgtcaacacagtacatccgggccccatcaagaccccgcggaaggatgatctggaaggttgggaggaaatgatgtcacagcgtacgttaacccctatgggccacattggcgaaccgaatgacatcgcatggatctgtgtgtacctggcatctgacgaatcgaaatttgcgacgggtgcagaatttgtggtcgacggcgggtggaccgcacag

SEQ ID NO: 132 - protein, 252 aa, Artificial Sequence
  Engineered Variant of Kred from Lactobacillus kefir
MTDRLKHKVAIVTGGTLGIGLAIADKFVEEGAKVVITGRHADVGEVAAKSIGGTDVIRFVQHDASEEAGWTKLFDTTEEAFGPVTTLVNNAGIGVIKSVEDTTTEEWRKILSVNLDGVFFGTRLGIQRMKNKGLGASIINMSSIMGLVGDPTLGAYNASKGAVRIMSKSAALDCALKDYDVRVNTVHPGPIKTPRKDDLEGWEEMMSQRTLTPMGHIGEPNDIAWICVYLASDESKFATGAEFVVDGGWTAQ

SEQ ID NO: 133 - DNA, 756 bp, Artificial Sequence
  Engineered Variant of Kred from Lactobacillus kefir
atgaccgatcgtctgaagcataaagtagccatcgttaccggcgggacactgggtatcggtttggcaatcgccgataaatttgtagaggagggtgcgaaagtagttattactggtcgtcacgcggatgtaggtgaaaaggccgccaaatcaatcggcggcactgatgttattcgctttgtccagcacgatgcgtccgaagaagcaggctggacgaaactgttcgacaccaccgaggaggcattcggcccggttacgaccctggtgaacaatgcagggattggggttattaaaagcgttgaactgactaccacggaggaatggcgtaaaatcctgtccgttaatctggatggtgtttttttcggcacccgtctgggcattcagcgcatgaaaaataaaggcttgggcgctagcatcatcaatatgagcagtattatggggctcgtaggcgatccgactctgggggcatacaacgcttccaagggggcggtacgtatcatgtcgaaaagcgcagcgctggattgcgcactgaaggactacgatgtgcgtgtcaacacagtacatccgggccccatcaagaccccgcggaaggatgatctggaaggttgggaggaaatgatgtcacagcgtacgttaacccctatgggccacattggcgaaccgaatgacatcgcatggatctgtgtgtacctggcatctgacgaatcgaaatttgcgacgggtgcagaatttgtggtcgacggcgggtggaccgcacag

SEQ ID NO: 134 - protein, 252 aa, Artificial Sequence
  Engineered Variant of Kred from Lactobacillus kefir
MTDRLKHKVAIVTGGTLGIGLAIADKFVEEGAKVVITGRHADVGEKAAKSIGGTDVIRFVQHDASEEAGWTKLFDTTEEAFGPVTTLVNNAGIGVIKSVELTTTEEWRKILSVNLDGVFFGTRLGIQRMKNKGLGASIINMSSIMGLVGDPTLGAYNASKGAVRIMSKSAALDCALKDYDVRVNTVHPGPIKTPRKDDLEGWEEMMSQRTLTPMGHIGEPNDIAWICVYLASDESKFATGAEFVVDGGWTAQ

SEQ ID NO: 135 - DNA, 756 bp, Artificial Sequence
  Engineered Variant of Kred from Lactobacillus kefir
atgaccgatcgtctgaagcataaagtagccatcgttaccggcgggacactgggtatcggtttggcaatcgccgataaatttgtagaggagggtgcgaaagtagttattactggtcgtcacgcggatgtaggtgaaaaggccgccaaatcaatcggcggcactgatgttattcgctttgtccagcacgatgcgtccgaagaagcaggctggacgaaactgttcgacaccaccgaggaggcattcggcccggttacgaccctggtgaacaatgcagggattggggttattaaaagcgttgaagacactaccacggaggaatggcgtaaaatcctgtccgttaatctggatggtgtttttttcggcacccgtctgggcattcagcgcatgaaaaataaaggcttgggcgctagcatcatcaatatgagcagtattatggggctcgtaggcgatccgactctgggggcatacaacgcttccaagggggcggtacgtatcatgtcgaaaagcgcagcgctggattgcgcactgaaggactacgatgtgcgtgtcaacacagtacatccgggccccatcaagaccccgcggaaggatcagctggaaggttgggaggaaatgatgtcacagcgtacgttaacccctatgggccacattggcgaaccgaatgacatcgcatggatctgtgtgtacctggcatctgacgaatcgaaatttgcgacgggtgcagaatttgtggtcgacggcgggtggaccgcacag

SEQ ID NO: 136 - protein, 252 aa, Artificial Sequence
  Engineered Variant of Kred from Lactobacillus kefir
MTDRLKHKVAIVTGGTLGIGLAIADKFVEEGAKVVITGRHADVGEKAAKSIGGTDVIRFVQHDASEEAGWTKLFDTTEEAFGPVTTLVNNAGIGVIKSVEDTTTEEWRKILSVNLDGVFFGTRLGIQRMKNKGLGASIINMSSIMGLVGDPTLGAYNASKGAVRIMSKSAALDCALKDYDVRVNTVHPGPIKTPRKDQLEGWEEMMSQRTLTPMGHIGEPNDIAWICVYLASDESKFATGAEFVVDGGWTAQ

SEQ ID NO: 137 - DNA, 756 bp, Artificial Sequence
  Engineered Variant of Kred from Lactobacillus kefir
atgaccgatcgtctgaagcataaagtagccatcgttaccggcgggacactgggtatcggtttggcaatcgccgataaatttgtagaggagggtgcgaaagtagttattactggtcgtcacgcggatgtaggtgaaaaggccgccaaatcaatcggcggcactgatgttattcgctttgtccagcacgatgcgtccgaagaagcaggctggacgaaactgttcgacaccaccgaggaggcattcggcccggttacgaccctggtgaacaatgcagggattggggttattaaaagcgttgaagacactaccacggaggaatggcgtaaaatcctgtccgttaatctggatggtgtttttttcggcacccgtctgggcattcagcgcatgaaaaataaaggcttgggcgctagcatcatcaatatgagcagtattatggggctcgtaggcgatccgttgctgggggcatacaacgcttccaagggggcggtacgtatcatgtcgaaaagcgcagcgctggattgcgcactgaaggactacgatgtgcgtgtcaacacagtacatccgggccccatcaagaccccgcggaaggatgatctggaaggttgggaggaaatgatgtcacagcgtacgttaacccctatgggccacattggcgaaccgaatgacatcgcatggatctgtgtgtacctggcatctgacgaatcgaaatttgcgacgggtgcagaatttgtggtcgacggcgggtggaccgcacag

SEQ ID NO: 138 - protein, 252 aa, Artificial Sequence
  Engineered Variant of Kred from Lactobacillus kefir
MTDRLKHKVAIVTGGTLGIGLAIADKFVEEGAKVVITGRHADVGEKAAKSIGGTDVIRFVQHDASEEAGWTKLFDTTEEAFGPVTTLVNNAGIGVIKSVEDTTTEEWRKILSVNLDGVFFGTRLGIQRMKNKGLGASIINMSSIMGLVGDPLLGAYNASKGAVRIMSKSAALDCALKDYDVRVNTVHPGPIKTPRKDDLEGWEEMMSQRTLTPMGHIGEPNDIAWICVYLASDESKFATGAEFVVDGGWTAQ

SEQ ID NO: 139 - DNA, 756 bp, Artificial Sequence
  Engineered Variant of Kred from Lactobacillus kefir
atgaccgatcgtctgaagcataaagtagccatcgttaccggcgggacactgggtatcggtttggcaatcgccgataaatttgtagaggagggtgcgaaagtagttattactggtcgtcacgcggatgtaggtgaaaaggccgccaaatcaatcggcggcactgatgttattcgctttgtccagcacgatgcgtccgaagaagcaggctggacgaaactgttcgacaccaccgagttggcattcggcccggttacgaccctggtgaacaatgcagggattggggttattaaaagcgttgaagacactaccacggaggaatggcgtaaaatcctgtccgttaatctggatggtgtttttttcggcacccgtctgggcattcagcgcatgaaaaataaaggcttgggcgctagcatcatcaatatgagcagtattatggggctcgtaggcgatccgactctgggggcatacaacgcttccaagggggcggtacgtatcatgtcgaaaagcgcagcgctggattgcgcactgaaggactacgatgtgcgtgtcaacacagtacatccgggccccatcaagaccccgcggaaggatgatctggaaggttgggaggaaatgatgtcacagcgtacgttaacccctatgggccacattggcgaaccgaatgacatcgcatggatctgtgtgtacctggcatctgacgaatcgaaatttgcgacgggtgcagaatttgtggtcgacggcgggtggaccgcacag

SEQ ID NO: 140 - protein, 252 aa, Artificial Sequence
  Engineered Variant of Kred from Lactobacillus kefir
MTDRLKHKVAIVTGGTLGIGLAIADKFVEEGAKVVITGRHADVGEKAAKSIGGTDVIRFVQHDASEEAGWTKLFDTTELAFGPVTTLVNNAGIGVIKSVEDTTTEEWRKILSVNLDGVFFGTRLGIQRMKNKGLGASIINMSSIMGLVGDPTLGAYNASKGAVRIMSKSAALDCALKDYDVRVNTVHPGPIKTPRKDDLEGWEEMMSQRTLTPMGHIGEPNDIAWICVYLASDESKFATGAEFVVDGGWTAQ

SEQ ID NO: 141 - DNA, 756 bp, Artificial Sequence
  Engineered Variant of Kred from Lactobacillus kefir
atgaccgatcgtctgaagcataaagtagccatcgttaccggcgggacactgggtatcggtttggcaatcgccgataaatttgtagaggagggtgcgaaagtagttattactggtcgtcacgcggatgtaggtgaaaaggccgccaaatcaatcggcggcactgatgttattcgctttgtccagcacgatgcgtccgaagaagcaggctggacggcgctgttcgacaccaccgaggaggcattcggcccggttacgaccctggtgaacaatgcagggattggggttattaaaagcgttgaagacactaccacggaggaatggcgtaaaatcctgtccgttaatctggatggtgtttttttcggcacccgtctgggcattcagcgcatgaaaaataaaggcttgggcgctagcatcatcaatatgagcagtattatggggctcgtaggcgatccgactctgggggcatacaacgcttccaagggggcggtacgtatcatgtcgaaaagcgcagcgctggattgcgcactgaaggactacgatgtgcgtgtcaacacagtacatccgggccccatcaagaccccgcggaaggatgatctggaaggttgggaggaaatgatgtcacagcgtacgttaacccctatgggccacattggcgaaccgaatgacatcgcatggatctgtgtgtacctggcatctgacgaatcgaaatttgcgacgggtgcagaatttgtggtcgacggcgggtggaccgcacag

SEQ ID NO: 142 - protein, 252 aa, Artificial Sequence
  Engineered Variant of Kred from Lactobacillus kefir
MTDRLKHKVAIVTGGTLGIGLAIADKFVEEGAKVVITGRHADVGEKAAKSIGGTDVIRFVQHDASEEAGWTALFDTTEEAFGPVTTLVNNAGIGVIKSVEDTTTEEWRKILSVNLDGVFFGTRLGIQRMKNKGLGASIINMSSIMGLVGDPTLGAYNASKGAVRIMSKSAALDCALKDYDVRVNTVHPGPIKTPRKDDLEGWEEMMSQRTLTPMGHIGEPNDIAWICVYLASDESKFATGAEFVVDGGWTAQ

SEQ ID NO: 143 - DNA, 756 bp, Artificial Sequence
  Engineered Variant of Kred from Lactobacillus kefir
atgaccgatcgtctgaagcataaagtagccatcgttaccggcgggacactgggtatcggtttggcaatcgccgataaatttgtagaggagggtgcgaaagtagttattactggtcgtcacgcggatgtaggtgaaaaggccgccaaatcaatcggcggcactgatgttattcgctttgtccagcacgatgcgtccgaagaagcaggctggacgaaactgttcgacaccaccgaggaggcattcggcccggttacgaccctggtgaacaatgcagggattggggttattaaaagcgttgaagacactaccacggaggaatggcgtaaaatcctgtccgttaatctggatggtgtttttttcggcacccgtctgggcattcagcgcatgaaaaataaaggcttgggcgctagcatcatcaatatgagcagtattatggggctcgtaggcgatccgactctgggggcatacaacgcttccaagggggcggtacgtatcatgtcgaaaagcgcagcgctggattgcgcactgaaggactacgatgtgcgtgtcaacacagtacatccgggcgctatcaagaccgagcgcaaggatgatctggaaggttgggaggaaatgatgtcacagcgtacgttaacccctatgggccacattggcgaaccgaatgacatcgcatggatctgtgtgtacctggcatctgacgaatcgaaatttgcgacgggtgcagaatttgtggtcgacggcgggtggaccgcacag

SEQ ID NO: 144 - protein, 252 aa, Artificial Sequence
  Engineered Variant of Kred from Lactobacillus kefir
MTDRLKHKVAIVTGGTLGIGLAIADKFVEEGAKVVITGRHADVGEKAAKSIGGTDVIRFVQHDASEEAGWTKLFDTTEEAFGPVTTLVNNAGIGVIKSVEDTTTEEWRKILSVNLDGVFFGTRLGIQRMKNKGLGASIINMSSIMGLVGDPTLGAYNASKGAVRIMSKSAALDCALKDYDVRVNTVHPGAIKTERKDDLEGWEEMMSQRTLTPMGHIGEPNDIAWICVYLASDESKFATGAEFVVDGGWTAQ

SEQ ID NO: 145 - DNA, 756 bp, Artificial Sequence
  Engineered Variant of Kred from Lactobacillus kefir
atgaccgatcgtctgaagcataaagtagccatcgttaccggcgggacactgggtatcggtttggcaatcgccgataaatttgtagaggagggtgcgaaagtagttattactggtcgtcacgcggatgtaggtgaaaaggccgccaaatcaatcggcggcactgatgttattcgctttgtccagcacgatgcgtccgaagaagcaggctggacgaaactgttcgacaccaccgaggaggcattcggcccggttacgaccctggtgaacaatgcagggattggggttattaaaagcgttgaagacactaccacggaggaatggcgtaaaatcctgtccgttaatctggatggtgtttttttcggcacccgtctgggcattcagcgcatgaaaaataaaggcttgggcgctagcatcatcaatatgagcagtattatggggctcgtaggcgatccgactctgggggcatacaacgcttccaagggggcggtacgtatcatgtcgaaaagcgcagcgctggattgcgcactgaaggactacgatgtgcgtgtcaacacagtacatccgggccctatcaagaccgagcgcaaggatgatctggaaggttgggaggaaatgatgtcacagcgtacgttaacccctatgggccacattggcgaaccgaatgacatcgcatggatctgtgtgtacctggcatctgacgaatcgaaatttgcgacgggtgcagaatttgtggtcgacggcgggtggaccgcacag

SEQ ID NO: 146 - protein, 252 aa, Artificial Sequence
  Engineered Variant of Kred from Lactobacillus kefir
MTDRLKHKVAIVTGGTLGIGLAIADKFVEEGAKVVITGRHADVGEKAAKSIGGTDVIRFVQHDASEEAGWTKLFDTTEEAFGPVTTLVNNAGIGVIKSVEDTTTEEWRKILSVNLDGVFFGTRLGIQRMKNKGLGASIINMSSIMGLVGDPTLGAYNASKGAVRIMSKSAALDCALKDYDVRVNTVHPGPIKTERKDDLEGWEEMMSQRTLTPMGHIGEPNDIAWICVYLASDESKFATGAEFVVDGGWTAQ

SEQ ID NO: 147 - DNA, 756 bp, Artificial Sequence
  Engineered Variant of Kred from Lactobacillus kefir
atgaccgatcgtctgaagcataaagtagccatcgttaccggcgggacactgggtatcggtttggcaatcgccgataaatttgtagaggagggtgcgaaagtagttattactggtcgtcacgcggatgtaggtgaaaaggccgccaaatcaatcggcggcactgatgttattcgctttgtccagcacgatgcgtccgaagaagcaggctggacgaaactgttcgacaccaccgaggaggcattcggcccggttacgaccctggtgaacaatgcagggattggggttattaaaagcgttgaagacactaccacggaggaatggcgtaaaatcctgtccgttaatctggatggtgtttttttcggcacccgtctgggcattcagcgcatgaaaaataaaggcttgggcgctagcatcatcaatatgagcagtattatggggctcgtaggcgatccgactctgggggcatactgcgcttccaagggggcggtacgtatcatgtcgaaaagcgcagcgctggattgcgcactgaaggactacgatgtgcgtgtcaacacagtacatccgggccccatcaagaccccgcggaaggatgatctggaaggttgggaggaaatgatgtcacagcgtacgttaacccctatgggccacattggcgaaccgaatgacatcgcatggatctgtgtgtacctggcatctgacgaatcgaaatttgcgacgggtgcagaatttgtggtcgacggcgggtggaccgcacag

SEQ ID NO: 148 - protein, 252 aa, Artificial Sequence
  Engineered Variant of Kred from Lactobacillus kefir
MTDRLKHKVAIVTGGTLGIGLAIADKFVEEGAKVVITGRHADVGEKAAKSIGGTDVIRFVQHDASEEAGWTKLFDTTEEAFGPVTTLVNNAGIGVIKSVEDTTTEEWRKILSVNLDGVFFGTRLGIQRMKNKGLGASIINMSSIMGLVGDPTLGAYCASKGAVRIMSKSAALDCALKDYDVRVNTVHPGPIKTPRKDDLEGWEEMMSQRTLTPMGHIGEPNDIAWICVYLASDESKFATGAEFVVDGGWTAQ

SEQ ID NO: 149 - DNA, 756 bp, Artificial Sequence
  Engineered Variant of Kred from Lactobacillus kefir
atgaccgatcgtctgaagcataaagtagccatcgttaccggcgggacaatgggtatcggtttggcaatcgccgataaatttgtagaggagggtgcgaaagtagttattactggtcgtcacgcggatgtaggtgaaaaggccgccaaatcaatcggcggcactgatgttattcgctttgtccagcacgatgcgtccgaagaagcaggctggacgaaactgttcgacaccaccgaggaggcattcggcccggttacgaccctggtgaacaatgcagggattggggttattaaaagcgttgaagacactaccacggaggaatggcgtaaaatcctgtccgttaatctggatggtgtttttttcggcacccgtctgggcattcagcgcatgaaaaataaaggcttgggcgctagcatcatcaatatgagcagtattatggggctcgtaggcgatccgactctgggggcatacaacgcttccaagggggcggtacgtatcatgtcgaaaagcgcagcgctggattgcgcactgaaggactacgatgtgcgtgtcaacacagtacatccgggccccatcaagaccccgcggaaggatgatctggaaggttgggaggaaatgatgtcacagcgtacgttaacccctatgggccacattggcgaaccgaatgacatcgcatggatctgtgtgtacctggcatctgacgaatcgaaatttgcgacgggtgcagaatttgtggtcgacggcgggtggaccgcacag

SEQ ID NO: 150 - protein, 252 aa, Artificial Sequence
  Engineered Variant of Kred from Lactobacillus kefir
MTDRLKHKVAIVTGGTMGIGLAIADKFVEEGAKVVITGRHADVGEKAAKSIGGTDVIRFVQHDASEEAGWTKLFDTTEEAFGPVTTLVNNAGIGVIKSVEDTTTEEWRKILSVNLDGVFFGTRLGIQRMKNKGLGASIINMSSIMGLVGDPTLGAYNASKGAVRIMSKSAALDCALKDYDVRVNTVHPGPIKTPRKDDLEGWEEMMSQRTLTPMGHIGEPNDIAWICVYLASDESKFATGAEFVVDGGWTAQ

SEQ ID NO: 151 - DNA, 756 bp, Artificial Sequence; identical to SEQ ID NO: 101
  Engineered Variant of Kred from Lactobacillus kefir

SEQ ID NO: 152 - protein, 252 aa, Artificial Sequence; identical to SEQ ID NO: 102
  Engineered Variant of Kred from Lactobacillus kefir

SEQ ID NO: 153 - DNA, 756 bp, Artificial Sequence
  Engineered Variant of Kred from Lactobacillus kefir
atgaccgatcgtctgaagcataaagtagccatcgttaccggcgggacactgggtatcggtttggcaatcgccgataaatttgtagaggagggtgcgaaagtagttattactggtcgtcacgcggatgtaggtgaaaaggccgccaaatcaatcggcggcactgatgttattcgctttgtccagcacgatgcgtccgaagaagcaggctggacgaaactgttcgacaccaccgaggaggcattcggcccggttacgaccctggtgaacaatgcagggattggggttattaaaagcgttgaagacactaccacggaggaatggcgtaaaatcctgtccgttaatctggatggtgtttttttcggcacccgtctgggcattcagcgcatgaaaaataaaggcttgggcgctagcatcatcaatatgagcagtattatggggctcgtaggcgatccgactctgggggcatacaacgcttccaagggggcggtacgtatcatgtcgaaaagcgcagcgctggattgcgcactgaaggactacgatgtgcgtgtcaacacagtacatccgggccctaccaagaccgagcgcaaggatgatctggaaggttgggaggaaatgatgtcacagcgtacgttaacccctatgggccacattggcgaaccgaatgacatcgcatggatctgtgtgtacctggcatctgacgaatcgaaatttgcgacgggtgcagaatttgtggtcgacggcgggtggaccgcacag

SEQ ID NO: 154 - protein, 252 aa, Artificial Sequence
  Engineered Variant of Kred from Lactobacillus kefir
MTDRLKHKVAIVTGGTLGIGLAIADKFVEEGAKVVITGRHADVGEKAAKSIGGTDVIRFVQHDASEEAGWTKLFDTTEEAFGPVTTLVNNAGIGVIKSVEDTTTEEWRKILSVNLDGVFFGTRLGIQRMKNKGLGASIINMSSIMGLVGDPTLGAYNASKGAVRIMSKSAALDCALKDYDVRVNTVHPGPTKTERKDDLEGWEEMMSQRTLTPMGHIGEPNDIAWICVYLASDESKFATGAEFVVDGGWTAQ

SEQ ID NO: 155 - DNA, 756 bp, Artificial Sequence
  Engineered Variant of Kred from Lactobacillus kefir
atgaccgatcgtctgaagcataaagtagccatcgttaccggcgggacactgggtatcggtttggcaatcgccgataaatttgtagaggagggtgcgaaagtagttattactggtcgtcacgcggatgtaggtgaaaaggccgccaaatcaatcggcggcactgatgttattcgctttgtccagcacgatgcgtccgaagaagcaggctggacgaaactgttcgacaccaccgaggaggcattcggcccggttacgaccctggtgaacaatgcagggattggggttattaaaagcgttgaagacactaccacggaggaatggcgtaaaatcctgtccgttaatctggatggtgtttttttcggcacccgtctgggcattcagcgcatgaaaaataaaggcttgggcgctagcatcatcaatatgagcagtattatggggctcgtaggcgatccgactctgggggcatacaacgcttccaagggggcggtacgtatcatgtcgaaaagcgcagcgctggattgcgcactgaaggactacgatgtgcgtgtcaacacagtacatccgggcgctaccaagaccgagcgcaaggatgatctggaaggttgggaggaaatgatgtcacagcgtacgttaacccctatgggccacattggcgaaccgaatgacatcgcatggatctgtgtgtacctggcatctgacgaatcgaaatttgcgacgggtgcagaatttgtggtcgacggcgggtggaccgcacag

SEQ ID NO: 156 - protein, 252 aa, Artificial Sequence
  Engineered Variant of Kred from Lactobacillus kefir
MTDRLKHKVAIVTGGTLGIGLAIADKFVEEGAKVVITGRHADVGEKAAKSIGGTDVIRFVQHDASEEAGWTKLFDTTEEAFGPVTTLVNNAGIGVIKSVEDTTTEEWRKILSVNLDGVFFGTRLGIQRMKNKGLGASIINMSSIMGLVGDPTLGAYNASKGAVRIMSKSAALDCALKDYDVRVNTVHPGATKTERKDDLEGWEEMMSQRTLTPMGHIGEPNDIAWICVYLASDESKFATGAEFVVDGGWTAQ

SEQ ID NO: 157 - DNA, 756 bp, Artificial Sequence
  Engineered Variant of Kred from Lactobacillus kefir
atgaccgatcgtctgaagcataaagtagccatcgttaccggcgggacactgggtatcggtttggcaatcgccgataaatttgtagaggagggtgcgaaagtagttattactggtcgtcacgcggatgtaggtgaaaaggccgccaaatcaatcggcggcactgatgttattcgctttgtccagcacgatgcgtccgaagaagcaggctggacgaaactgttcgacaccaccgaggaggcattcggcccggttacgaccctggtgaacaatgcagggattggggttattaaaagcgttgaagacactaccacggaggaatggcgtaaaatcctgtccgttaatctggatggtgtttttttcggcacccgtctgggcattcagcgcatgaaaaataaaggcttgggcgctagcatcatcaatatgagcagtattatggggctcgtaggcgatccgactctgggggcatacaacgctactaagggggcggtacgtatcatgtcgaaaagcgcagcgctggattgcgcactgaaggactacgatgtgcgtgtcaacacagtacatccgggccccatcaagaccccgcggaaggatgatctggaaggttgggaggaaatgatgtcacagcgtacgttaacccctatgggccacattggcgaaccgaatgacatcgcatggatctgtgtgtacctggcatctgacgaatcgaaatttgcgacgggtgcagaatttgtggtcgacggcgggtggaccgcacag

SEQ ID NO: 158 - protein, 252 aa, Artificial Sequence
  Engineered Variant of Kred from Lactobacillus kefir
MTDRLKHKVAIVTGGTLGIGLAIADKFVEEGAKVVITGRHADVGEKAAKSIGGTDVIRFVQHDASEEAGWTKLFDTTEEAFGPVTTLVNNAGIGVIKSVEDTTTEEWRKILSVNLDGVFFGTRLGIQRMKNKGLGASIINMSSIMGLVGDPTLGAYNATKGAVRIMSKSAALDCALKDYDVRVNTVHPGPIKTPRKDDLEGWEEMMSQRTLTPMGHIGEPNDIAWICVYLASDESKFATGAEFVVDGGWTAQ

SEQ ID NO: 159 - DNA, 756 bp, Artificial Sequence; identical to SEQ ID NO: 135
  Engineered Variant of Kred from Lactobacillus kefir

SEQ ID NO: 160 - protein, 252 aa, Artificial Sequence; identical to SEQ ID NO: 136
  Engineered Variant of Kred from Lactobacillus kefir

SEQ ID NO: 161 - DNA, 756 bp, Artificial Sequence
  Engineered Variant of Kred from Lactobacillus kefir
atgaccgatcgtctgaagcataaagtagccatcgttaccggcgggacactgggtatcggtttggcaatcgccgataaatttgtagaggagggtgcgaaagtagttattactggtcgtcacgcggatgtaggtgaaaaggccgccaaatcaatcggcggcactgatgttattcgctttgtccagcacgatgcgtccgaagaagcaggctggacgaaactgttcgacaccaccgaggaggcattcggcccggttacgaccctggtgaacaatgcagggattggggttattaaaagcgttgaagacactaccacggaggaatggcgtaaaatcctgtccgttaatctggatggtgtttttttcggcacccgtctgggcattcagcgcatgaaaaataaaggcttgggcgctagcatcatcaatatgagcagtattatggggctcgtaggcgatccgactctgggggcatacaacgcttccaagggggcggtacgtatcatgtcgaaaagcgcagcgctggattgcgcactgaaggactacgatgtgcgtgtcaacacagtacatccgggccccatcaagaccccgcggaaggatgcgctggaaggttgggaggaaatgatgtcacagcgtacgttaacccctatgggccacattggcgaaccgaatgacatcgcatggatctgtgtgtacctggcatctgacgaatcgaaatttgcgacgggtgcagaatttgtggtcgacggcgggtggaccgcacag

SEQ ID NO: 162 - protein, 252 aa, Artificial Sequence; identical to SEQ ID NO: 106
  Engineered Variant of Kred from Lactobacillus kefir

SEQ ID NO: 163 - DNA, 756 bp, Artificial Sequence
  Engineered Variant of Kred from Lactobacillus kefir
atgaccgatcgtctgaagcataaagtagccatcgttaccggcgggacaatgggtatcggtttggcaatcgccgataaatttgtagaggagggtgcgaaagtagttattactggtcgtcacgcggatgtaggtgaaaaggccgccaaatcaatcggcggcactgatgttattcgctttgtccagcacgatgcgtccgaagaagcaggctggacgaaactgttcgacaccaccgaggaggcattcggcccggttacgaccctggtgaacaatgcagggattggggttattaaaagcgttgaagacactaccacggaggaatggcgtaaaatcctgtccgttaatctggatggtgtttttttcggcacccgtctgggcattcagcgcatgaaaaataaaggcttgggcgctagcatcatcaatatgagcagtattatggggctcgtaggcgatccgactctgggggcatacaacgcttccaagggggcggtacgtatcatgtcgaaaagcgcagcgctggattgcgcactgaaggactacgatgtgcgtgtcaacacagtacatccgggcgcgatcaagaccccacggaaggatgctctggaaggttgggaggaaatgatgtcacagcgtacgttaacccctatgggccacattggcgaaccgaatgacatcgcatggatctgtgtgtacctggcatctgacgaatcgaaatttgcgacgggtgcagaatttgtggtcgacggcgggtggaccgcacag

SEQ ID NO: 164 - protein, 252 aa, Artificial Sequence
  Engineered Variant of Kred from Lactobacillus kefir
MTDRLKHKVAIVTGGTMGIGLAIADKFVEEGAKVVITGRHADVGEKAAKSIGGTDVIRFVQHDASEEAGWTKLFDTTEEAFGPVTTLVNNAGIGVIKSVEDTTTEEWRKILSVNLDGVFFGTRLGIQRMKNKGLGASIINMSSIMGLVGDPTLGAYNASKGAVRIMSKSAALDCALKDYDVRVNTVHPGAIKTPRKDALEGWEEMMSQRTLTPMGHIGEPNDIAWICVYLASDESKFATGAEFVVDGGWTAQ

SEQ ID NO: 165 - DNA, 756 bp, Artificial Sequence
  Engineered Variant of Kred from Lactobacillus kefir
atgaccgatcgtctgaagcataaagtagccatcgttaccggcgggacaatgggtatcggtttggcaatcgccgataaatttgtagaggagggtgcgaaagtagttattactggtcgtcacgcggatgtaggtgaagtagccgccaaatcaatcggcggcactgatgttattcgctttgtccagcacgatgcgtccgaagaagcaggctggacgaaactgttcgacaccaccgaggaggcattcggcccggttacgaccctggtgaacaatgcagggattggggttattaaaagcgttgaagacactaccacggaggaatggcgtaaaatcctgtccgttaatctggatggtgtttttttcggcacccgtctgggcattcagcgcatgaaaaataaaggcttgggcgctagcatcatcaatatgagcagtattatggggctcgtaggcgatccgactctgggggcatacaacgcttccaagggggcggtacgtatcatgtcgaaaagcgcagcgctggattgcgcactgaaggactacgatgtgcgtgtcaacacagtacatccgggccccatcaagaccccgcggaaggatgctctggaaggttgggaggaaatgatgtcacagcgtacgcgtacccctatgggccacattggcgaaccgaatgacatcgcatggatctgtgtgtacctggcatctgacgaatcgaaatttgcgacgggtgcagaatttgtggtcgacggcgggtggaccgcacag

SEQ ID NO: 166 - protein, 252 aa, Artificial Sequence
  Engineered Variant of Kred from Lactobacillus kefir
MTDRLKHKVAIVTGGTMGIGLAIADKFVEEGAKVVITGRHADVGEVAAKSIGGTDVIRFVQHDASEEAGWTKLFDTTEEAFGPVTTLVNNAGIGVIKSVEDTTTEEWRKILSVNLDGVFFGTRLGIQRMKNKGLGASIINMSSIMGLVGDPTLGAYNASKGAVRIMSKSAALDCALKDYDVRVNTVHPGPIKTPRKDALEGWEEMMSQRTRTPMGHIGEPNDIAWICVYLASDESKFATGAEFVVDGGWTAQ

SEQ ID NO: 167 - DNA, 756 bp, Artificial Sequence
  Engineered Variant of Kred from Lactobacillus kefir
atgaccgatcgtctgaagcataaagtagccatcgttaccggcgggacacagggtatcggtttggcaatcgccgataaatttgtagaggagggtgcgaaagtagttattactggtcgtcacgcggatgtaggtgaagtagccgccaaatcaatcggcggcactgatgttattcgctttgtccagcacgatgcgtccgaagaagcaggctggacgaaactgttcgacaccaccgaggaggcattcggcccggttacgaccctggtgaacaatgcagggattggggttattaaaagcgttgaagacactaccacggaggaatggcgtaaaatcctgtccgttaatctggatggtgtttttttcggcacccgtctgggcattcagcgcatgaaaaataaaggcttgggcgctagcatcatcaatatgagcagtattatggggctcgtaggcgatccgactctgggggcatacaacgcttccaagggggcggtacgtatcatgtcgaaaagcgcagcgctggattgcgcactgaaggactacgatgtgcgtgtcaacacagtacatccgggcccgatcaagaccgagcggaaggatcagctggaaggttgggaggaaatgatgtcacagcgtacgttaacccctatgggccacattggcgaaccgaatgacatcgcatggatctgtgtgtacctggcatctgacgaatcgaaatttgcgacgggtgcagaatttgtggtcgacggcgggtggaccgcacag

SEQ ID NO: 168 - protein, 252 aa, Artificial Sequence
  Engineered Variant of Kred from Lactobacillus kefir
MTDRLKHKVAIVTGGTQGIGLAIADKFVEEGAKVVITGRHADVGEVAAKSIGGTDVIRFVQHDASEEAGWTKLFDTTEEAFGPVTTLVNNAGIGVIKSVEDTTTEEWRKILSVNLDGVFFGTRLGIQRMKNKGLGASIINMSSIMGLVGDPTLGAYNASKGAVRIMSKSAALDCALKDYDVRVNTVHPGPIKTERKDQLEGWEEMMSQRTLTPMGHIGEPNDIAWICVYLASDESKFATGAEFVVDGGWTAQ

SEQ ID NO: 169 - DNA, 756 bp, Artificial Sequence
  Engineered Variant of Kred from Lactobacillus kefir
atgaccgatcgtctgaagcataaagtagccatcgttaccggcgggacaatgggtatcggtttggcaatcgccgataaatttgtagaggagggtgcgaaagtagttattactggtcgtcacgcggatgtaggtgaagtagccgccaaatcaatcggcggcactgatgttattcgctttgtccagcacgatgcgtccgaagaagcaggctggacgaaactgttcgacaccaccgaggaggcattcggcccggttacgaccctggtgaacaatgcagggattggggttattaaaagcgttgaagacactaccacggaggaatggcgtaaaatcctgtccgttaatctggatggtgtttttttcggcacccgtctgggcattcagcgcatgaaaaataaaggcttgggcgctagcatcatcaatatgagcagtattatggggctcgtaggcgatccgactctgggggcatacaacgcttccaagggggcggtacgtatcatgtcgaaaagcgcagcgctggattgcgcactgaaggactacgatgtgcgtgtcaacacagtacatccgggcgcgatcaagaccccacggaaggatgatctggaaggttgggaggaaatgatgtcacagcgtacgttaacccctatgggccacattggcgaaccgaatgacatcgcatggatctgtgtgtacctggcatctgacgaatcgaaatttgcgacgggtgcagaatttgtggtcgacggcgggtggaccgcacag

SEQ ID NO: 170 - protein, 252 aa, Artificial Sequence
  Engineered Variant of Kred from Lactobacillus kefir
MTDRLKHKVAIVTGGTMGIGLAIADKFVEEGAKVVITGRHADVGEVAAKSIGGTDVIRFVQHDASEEAGWTKLFDTTEEAFGPVTTLVNNAGIGVIKSVEDTTTEEWRKILSVNLDGVFFGTRLGIQRMKNKGLGASIINMSSIMGLVGDPTLGAYNASKGAVRIMSKSAALDCALKDYDVRVNTVHPGAIKTPRKDDLEGWEEMMSQRTLTPMGHIGEPNDIAWICVYLASDESKFATGAEFVVDGGWTAQ

SEQ ID NO: 171 - DNA, 756 bp, Artificial Sequence
  Engineered Variant of Kred from Lactobacillus kefir
atgaccgatcgtctgaagcataaagtagccatcgttaccggcgggacaatgggtatcggtttggcaatcgccgataaatttgtagaggagggtgcgaaagtagttattactggtcgtcacgcggatgtaggtgaaaaagccgccaaatcaatcggcggcactgatgttattcgctttgtccagcacgatgcgtccgaagaagcaggctggacgaaactgttcgacaccaccgaggaggcattcggcccggttacgaccctggtgaacaatgcagggattggggttattaaaagcgttgaagacactaccacggaggaatggcgtaaaatcctgtccgttaatctggatggtgtttttttcggcacccgtctgggcattcagcgcatgaaaaataaaggcttgggcgctagcatcatcaatatgagcagtattatggggctcgtaggcgatccgactctgggggcatacaacgcttccaagggggcggtacgtatcatgtcgaaaagcgcagcgctggattgcgcactgaaggactacgatgtgcgtgtcaacacagtacatccgggcgcgatcaagaccccacggaaggatcagctggaaggttgggaggaaatgatgtcacagcgtacgctgacccctatgggccacattggcgaaccgaatgacatcgcatggatctgtgtgtacctggcatctgacgaatcgaaatttgcgacgggtgcagaatttgtggtcgacggcgggtggaccgcacag

SEQ ID NO: 172 - protein, 252 aa, Artificial Sequence
  Engineered Variant of Kred from Lactobacillus kefir
MTDRLKHKVAIVTGGTMGIGLAIADKFVEEGAKVVITGRHADVGEKAAKSIGGTDVIRFVQHDASEEAGWTKLFDTTEEAFGPVTTLVNNAGIGVIKSVEDTTTEEWRKILSVNLDGVFFGTRLGIQRMKNKGLGASIINMSSIMGLVGDPTLGAYNASKGAVRIMSKSAALDCALKDYDVRVNTVHPGAIKTPRKDQLEGWEEMMSQRTLTPMGHIGEPNDIAWICVYLASDESKFATGAEFVVDGGWTAQ

SEQ ID NO: 173 - DNA, 756 bp, Artificial Sequence
  Engineered Variant of Kred from Lactobacillus kefir
atgaccgatcgtctgaagcataaagtagccatcgttaccggcgggacacagggtatcggtttggcaatcgccgataaatttgtagaggagggtgcgaaagtagttattactggtcgtcacgcggatgtaggtgaagtagccgccaaatcaatcggcggcactgatgttattcgctttgtccagcacgatgcgtccgaagaagcaggctggacgaaactgttcgacaccaccgaggaggcattcggcccggttacgaccctggtgaacaatgcagggattggggttattaaaagcgttgaagacactaccacggaggaatggcgtaaaatcctgtccgttaatctggatggtgtttttttcggcacccgtctgggcattcagcgcatgaaaaataaaggcttgggcgctagcatcatcaatatgagcagtattatggggctcgtaggcgatccgactctgggggcatacaacgcttccaagggggcggtacgtatcatgtcgaaaagcgcagcgctggattgcgcactgaaggactacgatgtgcgtgtcaacacagtacatccgggcgcgatcaagaccgagcggaaggatcagctggaaggttgggaggaaatgatgtcacagcgtacgttaacccctatgggccacattggcgaaccgaatgacatcgcatggatctgtgtgtacctggcatctgacgaatcgaaatttgcgacgggtgcagaatttgtggtcgacggcgggtggaccgcacag

SEQ ID NO: 174 - protein, 252 aa, Artificial Sequence
  Engineered Variant of Kred from Lactobacillus kefir
MTDRLKHKVAIVTGGTQGIGLAIADKFVEEGAKVVITGRHADVGEVAAKSIGGTDVIRFVQHDASEEAGWTKLFDTTEEAFGPVTTLVNNAGIGVIKSVEDTTTEEWRKILSVNLDGVFFGTRLGIQRMKNKGLGASIINMSSIMGLVGDPTLGAYNASKGAVRIMSKSAALDCALKDYDVRVNTVHPGAIKTERKDQLEGWEEMMSQRTLTPMGHIGEPNDIAWICVYLASDESKFATGAEFVVDGGWTAQ

SEQ ID NO: 175 - DNA, 756 bp, Artificial Sequence
  Engineered Variant of Kred from Lactobacillus kefir
atgaccgatcgtctgaagcataaagtagccatcgttaccggcgggacaatgggtatcggtttggcaatcgccgataaatttgtagaggagggtgcgaaagtagttattactggtcgtcacgcggatgtaggtgaaaaagccgccaaatcaatcggcggcactgatgttattcgctttgtccagcacgatgcgtccgaagaagcaggctggacgaaactgttcgacaccaccgaggaggcattcggcccggttacgaccctggtgaacaatgcagggattggggttgttaaaagcgttgaagacactaccacggaggaatggcgtaaaatcctgtccgttaatctggatggtgtttttttcggcacccgtctgggcattcagcgcatgaaaaataaaggcttgggcgctagcatcatcaatatgagcagtattatggggctcgtaggcgatccgactctgggggcatacaacgcttccaagggggcggtacgtatcatgtcgaaaagcgcagcgctggattgcgcactgaaggactacgatgtgcgtgtcaacacagtacatccgggcccgatcaagaccgagcggaaggatcagctggaaggttgggaggaaatgatgtcacagcgtacgttaacccctatgggccacattggcgaaccgaatgacatcgcatggatctgtgtgtacctggcatctgacgaatcgaaatttgcgacgggtgcagaatttgtggtcgacggcgggtggaccgcacag

SEQ ID NO: 176 - protein, 252 aa, Artificial Sequence
  Engineered Variant of Kred from Lactobacillus kefir
MTDRLKHKVAIVTGGTMGIGLAIADKFVEEGAKVVITGRHADVGEKAAKSIGGTDVIRFVQHDASEEAGWTKLFDTTEEAFGPVTTLVNNAGIGVVKSVEDTTTEEWRKILSVNLDGVFFGTRLGIQRMKNKGLGASIINMSSIMGLVGDPTLGAYNASKGAVRIMSKSAALDCALKDYDVRVNTVHPGPIKTERKDQLEGWEEMMSQRTLTPMGHIGEPNDIAWICVYLASDESKFATGAEFVVDGGWTAQ

SEQ ID NO: 177 - DNA, 756 bp, Artificial Sequence
  Engineered Variant of Kred from Lactobacillus kefir
atgaccgatcgtctgaagcataaagtagccatcgttaccggcgggacaatgggtatcggtttggcaatcgccgataaatttgtagaggagggtgcgaaagtagttattactggtcgtcacgcggatgtaggtgaaaaagccgccaaatcaatcggcggcactgatgttattcgctttgtccagcacgatgcgtccgaagaagcaggctggacgaaactgttcgacaccaccgaggaggcattcggcccggttacgaccctggtgaacaatgcagggattggggttattaaaagcgttgaagacactaccacggaggaatggcgtaaaatcctgtccgttaatctggatggtgtttttttcggcacccgtctgggcattcagcgcatgaaaaataaaggcttgggcgctagcatcatcaatatgagcagtattatggggctcgtaggcgatccgactctgggggcatacaacgcttccaagggggcggtacgtatcatgtcgaaaagcgcagcgctggattgcgcactgaaggactacgatgtgcgtgtcaacacagtacatccgggcgcgatcaagaccccacggaaggatcagctggaaggttgggagcagatgatgtcacagcgtacgctgacccctatgggccacattggcgaaccgaatgacatcgcatggatctgtgtgtacctggcatctgacgaatcgaaatttgcgacgggtgcagaatttgtggtcgacggcgggtggaccgcacag

SEQ ID NO: 178 - protein, 252 aa, Artificial Sequence
  Engineered Variant of Kred from Lactobacillus kefir
MTDRLKHKVAIVTGGTMGIGLAIADKFVEEGAKVVITGRHADVGEKAAKSIGGTDVIRFVQHDASEEAGWTKLFDTTEEAFGPVTTLVNNAGIGVIKSVEDTTTEEWRKILSVNLDGVFFGTRLGIQRMKNKGLGASIINMSSIMGLVGDPTLGAYNASKGAVRIMSKSAALDCALKDYDVRVNTVHPGAIKTPRKDQLEGWEQMMSQRTLTPMGHIGEPNDIAWICVYLASDESKFATGAEFVVDGGWTAQ

SEQ ID NO: 179 - DNA, 756 bp, Artificial Sequence
  Engineered Variant of Kred from Lactobacillus kefir
atgaccgatcgtctgaagcataaagtagccatcgttaccggcgggacaatgggtatcggtttggcaatcgccgataaatttgtagaggagggtgcgaaagtagttattactggtcgtcacgcggatgtaggtgaaaaagccgccaaatcaatcggcggcactgatgttattcgctttgtccagcacgatgcgtccgaagaagcaggctggacgaaactgttcgacaccaccgaggaggcattcggcccggttacgaccctggtgaacaatgcagggattggggttattaaaagcgttgaagacactaccacggaggaatggcgtaaaatcctgtccgttaatctggatggtgtttttttcggcacccgtctgggcattcagcgcatgaaaaataaaggcttgggcgctagcatcatcaatatgagcagtattatggggctcgtaggcgatccgactctgggggcatacaacgcttccaagggggcggtacgtatcatgtcgaaaagcgcagcgctggattgcgcactgaaggactacgatgtgcgtgtcaacacagtacatccgggcgcgatcaagaccccacggaaggatcagctggaaggttgggaggaaatgatgtcacagcgtacgctgacccctatgggccacattggcgaaccgaatgacatcgcatgggtgtgtgtgtacctggcatctgacgaatcgaaatttgcgacgggtgcagaatttgtggtcgacggcgggtggaccgcacag

SEQ ID NO: 180 - protein, 252 aa, Artificial Sequence
  Engineered Variant of Kred from Lactobacillus kefir
MTDRLKHKVAIVTGGTMGIGLAIADKFVEEGAKVVITGRHADVGEKAAKSIGGTDVIRFVQHDASEEAGWTKLFDTTEEAFGPVTTLVNNAGIGVIKSVEDTTTEEWRKILSVNLDGVFFGTRLGIQRMKNKGLGASIINMSSIMGLVGDPTLGAYNASKGAVRIMSKSAALDCALKDYDVRVNTVHPGAIKTPRKDQLEGWEEMMSQRTLTPMGHIGEPNDIAWVCVYLASDESKFATGAEFVVDGGWTAQ

SEQ ID NO: 181 - DNA, 756 bp, Artificial Sequence
  Engineered Variant of Kred from Lactobacillus kefir
atgaccgatcgtctgaagcataaagtagccatcgttaccggcgggacaatgggtatcggtttggcaatcgccgataaatttgtagaggagggtgcgaaagtagttattactggtcgtcacgcggatgtaggtgaaaaagccgccaaatcaatcggcggcactgatgttattcgctttgtccagcacgatgcgtccgaagaagcaggctggacgaaactgttcgacaccaccgaggaggcattcggcccggttacgaccctggtgaacaatgcagggattggggttattaaaagcgttgaatatactaccacggaggaatggcgtaaaatcctgtccgttaatctggatggtgtttttttcggcacccgtctgggcattcagcgcatgaaaaataaaggcttgggcgctagcatcatcaatatgagcagtattatggggctcgtaggcgatccgactctgggggcatacaacgcttccaagggggcggtacgtatcatgtcgaaaagcgcagcgctggattgcgcactgaaggactacgatgtgcgtgtcaacacagtacatccgggcgcgatcaagaccccacggaaggatcagctggaaggttgggaggaaatgatgtcacagcgtacgctgacccctatgggccacattggcgaaccgaatgacatcgcatggatctgtgtgtacctggcatctgacgaatcgaaatttgcgacgggtgcagaatttgtggtcgacggcgggtggaccgcacag

SEQ ID NO: 182 - protein, 252 aa, Artificial Sequence
  Engineered Variant of Kred from Lactobacillus kefir
MTDRLKHKVAIVTGGTMGIGLAIADKFVEEGAKVVITGRHADVGEKAAKSIGGTDVIRFVQHDASEEAGWTKLFDTTEEAFGPVTTLVNNAGIGVIKSVEYTTTEEWRKILSVNLDGVFFGTRLGIQRMKNKGLGASIINMSSIMGLVGDPTLGAYNASKGAVRIMSKSAALDCALKDYDVRVNTVHPGAIKTPRKDQLEGWEEMMSQRTLTPMGHIGEPNDIAWICVYLASDESKFATGAEFVVDGGWTAQ

SEQ ID NO: 183 - DNA, 756 bp, Artificial Sequence
  Engineered Variant of Kred from Lactobacillus kefir
atgaccgatcgtctgaagcataaagtagccatcgttaccggcgggacaatgggtatcggtttggcaatcgccgataaatttgtagaggagggtgcgaaagtagttattactggtcgtcacgcggatgtaggtgaaaaagccgccaaatcaatcggcggcactgatgttattcgctttgtccagcacgatgcgtccgaagaagcaggctggacgaaactgttcgacaccaccgaggaggcattcggcccggttacgaccctggtgaacaatgcagggattggggttattaaaagcgttgaagacactaccacggaggaatggcgtaaaatcctgtccgttaatctggatggtgtttttttcggcacccgtctgggcattcagcgcatgaaaaataaaggcttgggcgctagcatcatcaatatgagcagtattatggggctcgtaggcgatccgactctgggggcatacaacgcttccaagggggcggtacgtatcatgtcgaaaagcgcagcgctggattgcgcactgaaggacatggatgtgcgtgtcaacacagtacatccgggcgcgatcaagaccccacggaaggatcagctggaaggttgggaggaaatgatgtcacagcgtacgctgacccctatgggccacattggcgaaccgaatgacatcgcatggatctgtgtgtacctggcatctgacgaatcgaaatttgcgacgggtgcagaatttgtggtcgacggcgggtggaccgcacag

SEQ ID NO: 184 - protein, 252 aa, Artificial Sequence
  Engineered Variant of Kred from Lactobacillus kefir
MTDRLKHKVAIVTGGTMGIGLAIADKFVEEGAKVVITGRHADVGEKAAKSIGGTDVIRFVQHDASEEAGWTKLFDTTEEAFGPVTTLVNNAGIGVIKSVEDTTTEEWRKILSVNLDGVFFGTRLGIQRMKNKGLGASIINMSSIMGLVGDPTLGAYNASKGAVRIMSKSAALDCALKDMDVRVNTVHPGAIKTPRKDQLEGWEEMMSQRTLTPMGHIGEPNDIAWICVYLASDESKFATGAEFVVDGGWTAQ

SEQ ID NO: 185 - DNA, 756 bp, Artificial Sequence
  Engineered Variant of Kred from Lactobacillus kefir
atgaccgatcgtctgaagcataaagtagccatcgttaccggcgggacaatgggtatcggtttggcaatcgccgataaatttgtagaggagggtgcgaaagtagttattactggtcgtcacgcggatgtaggtgaaaaagccgccaaatcaatcggcggcactgatgttattcgctttgtccagcacgatgcgtccgaagaagcaggctggacgaaactgttcgacaccaccgaggaggcattcggcccggttacgaccctggtgaacaatgcagggattggggttattaaaagcgttgaacggactaccacggaggaatggcgtaaaatcctgtccgttaatctggatggtgtttttttcggcacccgtctgggcattcagcgcatgaaaaataaaggcttgggcgctagcatcatcaatatgagcagtattatggggctcgtaggcgatccgactctgggggcatacaacgcttccaagggggcggtacgtatcatgtcgaaaagcgcagcgctggattgcgcactgaaggactacgatgtgcgtgtcaacacagtacatccgggcgcgatcaagaccccacggaaggatcagctggaaggttgggaggaaatgatgtcacagcgtacgctgacccctatgggccacattggcgaaccgaatgacatcgcatggatctgtgtgtacctggcatctgacgaatcgaaatttgcgacgggtgcagaatttgtggtcgacggcgggtggaccgcacag

SEQ ID NO: 186 - protein, 252 aa, Artificial Sequence
  Engineered Variant of Kred from Lactobacillus kefir
MTDRLKHKVAIVTGGTMGIGLAIADKFVEEGAKVVITGRHADVGEKAAKSIGGTDVIRFVQHDASEEAGWTKLFDTTEEAFGPVTTLVNNAGIGVIKSVERTTTEEWRKILSVNLDGVFFGTRLGIQRMKNKGLGASIINMSSIMGLVGDPTLGAYNASKGAVRIMSKSAALDCALKDYDVRVNTVHPGAIKTPRKDQLEGWEEMMSQRTLTPMGHIGEPNDIAWICVYLASDESKFATGAEFVVDGGWTAQ

SEQ ID NO: 187 - DNA, 756 bp, Artificial Sequence
  Engineered Variant of Kred from Lactobacillus kefir
atgaccgatcgtctgaagcataaagtagccatcgttaccggcgggacaatgggtatcggtttggcaatcgccgataaatttgtagaggagggtgcgaaagtagttattactggtcgtcacgcggatgtaggtgaaaaagccgccaaatcaatcggcggcactgatgttattcgctttgtccagcacgatgcgtccgaagaagcaggctggacgaaactgttcgacaccaccgaggaggcattcggcccggttacgaccctggtgaacaatgcagggattggggttattaaaagcgttgaagacactaccacggaggaatggcgtaaaatcctgtccgttaatctggatggtgtttttttcggcacccgtctgggcattcagcgcatgaaaaataaaggcttgggcgctagcatcatcaatatgagcagtattatggggctcgtaggcgatccgactctgggggcatacaacgcttccaagggggcggtacgtatcatgtcgaaaagcgcagcgctggattgcgcactgaaggactacgatgtgcgtgtcaacacagtacatccgggcgcgatcaagaccccacggaaggatcagctggaaggttgggaggaaatgatgtcacagcgtacgctgacccctatgggccacattggcgaaccgaatgacatcgcatggatctgtgtgtacctggggtctgacgaatcgaaatttgcgacgggtgcagaatttgtggtcgacggcgggtggaccgcacag

SEQ ID NO: 188 - protein, 252 aa, Artificial Sequence
  Engineered Variant of Kred from Lactobacillus kefir
MTDRLKHKVAIVTGGTMGIGLAIADKFVEEGAKVVITGRHADVGEKAAKSIGGTDVIRFVQHDASEEAGWTKLFDTTEEAFGPVTTLVNNAGIGVIKSVEDTTTEEWRKILSVNLDGVFFGTRLGIQRMKNKGLGASIINMSSIMGLVGDPTLGAYNASKGAVRIMSKSAALDCALKDYDVRVNTVHPGAIKTPRKDQLEGWEEMMSQRTLTPMGHIGEPNDIAWICVYLGSDESKFATGAEFVVDGGWTAQ

SEQ ID NO: 189 - DNA, 756 bp, Artificial Sequence
  Engineered Variant of Kred from Lactobacillus kefir
atgaccgatcgtctgaagcataaagtagccatcgttaccggcgggacaatgggtatcggtttggcaatcgccgataaatttgtagaggagggtgcgaaagtagttattactggtcgtcacgcggatgtaggtgaaaaagccgccaaatcaatcggcggcactgatgttattcgctttgtccagcacgatgcgtccgaagaagcaggctggacgaaactgttcgacaccaccgaggaggcattcggcccggttacgaccctggtgaacaatgcagggattggggttattaaaagcgttgaagacactaccacggaggaatggcgtaaaatcctgtccgttaatctggatggtgtttttttcggcacccgtctgggcattcagcgcatgaaaaataaaggcttgggcgctagcatcatcaatatgagcagtattatggggctcgtaggcgatccgactctgggggcatacaacgcttccaagggggcggtacgtatcatgtcgaaaagcgcagcgctggattgcgcactgaaggactacgatgtgcgtgtcaacacagtacatccgggcgcgatcaagaccgagcggaaggatcagctggaaggttgggaggaaatgatgtcacagcgtacgctgacccctatgggccacattggcgaaccgaatgacatcgcatggatctgtgtgtacctggcatctgacgaatcgaaatttgcgacgggtgcagaatttgtggtcgacggcgggtggaccgcacag

SEQ ID NO: 190 - protein, 252 aa, Artificial Sequence
  Engineered Variant of Kred from Lactobacillus kefir
MTDRLKHKVAIVTGGTMGIGLAIADKFVEEGAKVVITGRHADVGEKAAKSIGGTDVIRFVQHDASEEAGWTKLFDTTEEAFGPVTTLVNNAGIGVIKSVEDTTTEEWRKILSVNLDGVFFGTRLGIQRMKNKGLGASIINMSSIMGLVGDPTLGAYNASKGAVRIMSKSAALDCALKDYDVRVNTVHPGAIKTERKDQLEGWEEMMSQRTLTPMGHIGEPNDIAWICVYLASDESKFATGAEFVVDGGWTAQ

SEQ ID NO: 191 - DNA, 756 bp, Artificial Sequence
  Engineered Variant of Kred from Lactobacillus kefir
atgaccgatcgtctgaagcataaagtagccatcgttaccggcgggacaatgggtatcggtttggcaatcgccgataaatttgtagaggagggtgcgaaagtagttattactggtcgtcacgcggatgtaggtttgaaggccgccaaatcaatcggcggcactgatgttattcgctttgtccagcacgatgcgtccgaagaagcaggctggacgaaactgttcgacaccaccgaggaggcattcggcccggttacgaccctggtgaacaatgcagggattggggttattaaaagcgttgaagacactaccacggaggaatggcgtaaaatcctgtccgttaatctggatggtgtttttttcggcacccgtctgggcattcagcgcatgaaaaataaaggcttgggcgctagcatcatcaatatgagcagtattatggggctcgtaggcgatccgactctgggggcatacaacgcttccaagggggcggtacgtatcatgtcgaaaagcgcagcgctggattgcgcactgaaggactacgatgtgcgtgtcaacacagtacatccgggcgcgatcaagaccccacggaaggatcagctggaaggttgggaggaaatgatgtcacagcgtacgctgacccctatgggccacattggcgaaccgaatgacatcgcatggatctgtgtgtacctggcatctgacgaatcgaaatttgcgacgggtgcagaatttgtggtcgacggcgggtggaccgcacag

SEQ ID NO: 192 - protein, 252 aa, Artificial Sequence
  Engineered Variant of Kred from Lactobacillus kefir
MTDRLKHKVAIVTGGTMGIGLAIADKFVEEGAKVVITGRHADVGLKAAKSIGGTDVIRFVQHDASEEAGWTKLFDTTEEAFGPVTTLVNNAGIGVIKSVEDTTTEEWRKILSVNLDGVFFGTRLGIQRMKNKGLGASIINMSSIMGLVGDPTLGAYNASKGAVRIMSKSAALDCALKDYDVRVNTVHPGAIKTPRKDQLEGWEEMMSQRTLTPMGHIGEPNDIAWICVYLASDESKFATGAEFVVDGGWTAQ

SEQ ID NO: 193 - DNA, 756 bp, Artificial Sequence
  Engineered Variant of Kred from Lactobacillus kefir
atgaccgatcgtctgaagcataaagtagccatcgttaccggcgggacaatgggtatcggtttggcaatcgccgataaatttgtagaggagggtgcgaaagtagttattactggtcgtcacgcggatgtaggtgaaaaagccgccaaatcaatcggcggcactgatgttattcgctttgtccagcacgatgcgtccgaagaagcaggctggacgaaactgttcgacaccaccgaggaggcattcggcccggttacgaccctggtgaacaatgcagggattggggtaattaagagcgttgaacggactaccacggaggaatggcgtaaaatcctgtccgttaatctggatggtgtttttttcggcacccgtctgggcattcagcgcatgaaaaataaaggcttgggcgctagcatcatcaatatgagcagtattatggggctcgtaggcgctccgactgcaggggcatacaacgcttccaagggggcggtacgtatcatgtcgaaaagcgcagcgctggattgcgcactgaaggactacgatgtgcgtgtcaacacagtacatccgggcgcgatcaagaccccacggaaggatcagctggaaggttgggaggaagcaatgtcacagcgtacggcgacccctatgggccacattggcgaaccgaatgacatcgcatggatctgtgtgtacctggcatctgacgaatcgaaatttgcgacgggtgcagaatttgtggtcgacggcgggtggaccgcacag

SEQ ID NO: 194 - protein, 252 aa, Artificial Sequence
  Engineered Variant of Kred from Lactobacillus kefir
MTDRLKHKVAIVTGGTMGIGLAIADKFVEEGAKVVITGRHADVGEKAAKSIGGTDVIRFVQHDASEEAGWTKLFDTTEEAFGPVTTLVNNAGIGVIKSVERTTTEEWRKILSVNLDGVFFGTRLGIQRMKNKGLGASIINMSSIMGLVGAPTAGAYNASKGAVRIMSKSAALDCALKDYDVRVNTVHPGAIKTPRKDQLEGWEEAMSQRTATPMGHIGEPNDIAWICVYLASDESKFATGAEFVVDGGWTAQ

SEQ ID NO: 195 - DNA, 756 bp, Artificial Sequence
  Engineered Variant of Kred from Lactobacillus kefir
atgaccgatcgtctgaagcataaagtagccatcgttaccggcgggacaatgggtatcggtttggcaatcgccgataaatttgtagaggagggtgcgaaagtagttattactggtcgtcacgcggatgtaggtgaaaaagccgccaaatcaatcggcggcactgatgttattcgctttgtccagcacgatgcgtccgaagaagcaggctggacgaaactgttcgacaccaccgaggaggcattcggcccggttacgaccctggtgaacaatgcagggattggggtaattaagagcgttgaacggactaccacggaggaatggcgtaaaatcctgtccgttaatctggatggtgtttttttcggcacccgtctgggcattcagcgcatgaaaaataaaggcttgggcgctagcatcatcaatatgagcagtattatggggctcgtaggcgctccgactgcaggggcatacaacgcttccaagggggcggtacgtatcatgtcgaaaagcgcagcgctggattgcgcactgaaggactacgatgtgcgtgtcaacacagtacatccgggcgcgatcaagaccccacggaaggatcagctggaaggttgggaggaaatgatgtcacagcgtacggcgacccctatgggccacattggcgaaccgaatgacatcgcatggatctgtgtgtacctggcatctgacgaatcgaaatttgcgacgggtgcagaatttgtggtcgacggcgggtggaccgcacag

SEQ ID NO: 196 - protein, 252 aa, Artificial Sequence
  Engineered Variant of Kred from Lactobacillus kefir
MTDRLKHKVAIVTGGTMGIGLAIADKFVEEGAKVVITGRHADVGEKAAKSIGGTDVIRFVQHDASEEAGWTKLFDTTEEAFGPVTTLVNNAGIGVIKSVERTTTEEWRKILSVNLDGVFFGTRLGIQRMKNKGLGASIINMSSIMGLVGAPTAGAYNASKGAVRIMSKSAALDCALKDYDVRVNTVHPGAIKTPRKDQLEGWEEMMSQRTATPMGHIGEPNDIAWICVYLASDESKFATGAEFVVDGGWTAQ

SEQ ID NO: 197 - DNA, 756 bp, Artificial Sequence
  Engineered Variant of Kred from Lactobacillus kefir
atgaccgatcgtctgaagcataaagtagccatcgttaccggcgggacaatgggtatcggtttggcaatcgccgataaatttgtagaggagggtgcgaaagtagttattactggtcgtcacgcggatgtaggtgaaaaagccgccaaatcaatcggcggcactgatgttattcgctttgtccagcacgatgcgtccgaagaagcaggctggacgaaactgttcgacaccaccgaggaggcattcggcccggttacgaccctggtgaacaatgcagggattggggcaattgcgagcgttgaacggactaccacggaggaatggcgtaaaatcctgtccgttaatctggatggtgtttttttcggcacccgtctgggcattcagcgcatgaaaaataaaggcttgggcgctagcatcatcaatatgagcagtattatggggctcgtaggcgctccgactgcaggggcatacaacgcttccaagggggcggtacgtatcatgtcgaaaagcgcagcgctggattgcgcactgaaggactacgatgtgcgtgtcaacacagtacatccgggcgcgatcaagaccccacggaaggatcagctggaaggttgggaggaaatgatgtcacagcgtacgctgacccctatgggccacattggcgaaccgaatgacatcgcatggatctgtgtgtacctggcatctgacgaatcgaaatttgcgacgggtgcagaatttgtggtcgacggcgggtggaccgcacag

SEQ ID NO: 198 - protein, 252 aa, Artificial Sequence
  Engineered Variant of Kred from Lactobacillus kefir
MTDRLKHKVAIVTGGTMGIGLAIADKFVEEGAKVVITGRHADVGEKAAKSIGGTDVIRFVQHDASEEAGWTKLFDTTEEAFGPVTTLVNNAGIGAIASVERTTTEEWRKILSVNLDGVFFGTRLGIQRMKNKGLGASIINMSSIMGLVGAPTAGAYNASKGAVRIMSKSAALDCALKDYDVRVNTVHPGAIKTPRKDQLEGWEEMMSQRTLTPMGHIGEPNDIAWICVYLASDESKFATGAEFVVDGGWTAQ

SEQ ID NO: 199 - DNA, 756 bp, Artificial Sequence
  Engineered Variant of Kred from Lactobacillus kefir
atgaccgatcgtctgaagcataaagtagccatcgttaccggcgggacaatgggtatcggtttggcaatcgccgataaatttgtagaggagggtgcgaaagtagttattactggtcgtcacgcggatgtaggtgaaaaagccgccaaatcaatcggcggcactgatgttattcgctttgtccagcacgatgcgtccgaagaagcaggctggacgaaactgttcgacaccaccgaggaggcattcggcccggttacgaccctggtgaacaatgcagggattggggcaattaagagcgttgaacggactaccacggaggaatggcgtaaaatcctgtccgttaatctggatggtgtttttttcggcacccgtctgggcattcagcgcatgaaaaataaaggcttgggcgctagcatcatcaatatgagcagtattatggggctcgtaggcgctccgactgcaggggcatacaacgcttccaagggggcggtacgtatcatgtcgaaaagcgcagcgctggattgcgcactgaaggactacgatgtgcgtgtcaacacagtacatccgggcgcgatcaagaccccacggaaggatcagctggaaggttgggaggaagcaatgtcacagcgtacggcgacccctatgggccacattggcgaaccgaatgacatcgcatggatctgtgtgtacctggcatctgacgaatcgaaatttgcgacgggtgcagaatttgtggtcgacggcgggtggaccgcacag

SEQ ID NO: 200 - protein, 252 aa, Artificial Sequence
  Engineered Variant of Kred from Lactobacillus kefir
MTDRLKHKVAIVTGGTMGIGLAIADKFVEEGAKVVITGRHADVGEKAAKSIGGTDVIRFVQHDASEEAGWTKLFDTTEEAFGPVTTLVNNAGIGAIKSVERTTTEEWRKILSVNLDGVFFGTRLGIQRMKNKGLGASIINMSSIMGLVGAPTAGAYNASKGAVRIMSKSAALDCALKDYDVRVNTVHPGAIKTPRKDQLEGWEEAMSQRTATPMGHIGEPNDIAWICVYLASDESKFATGAEFVVDGGWTAQ

SEQ ID NO: 201 - DNA, 756 bp, Artificial Sequence
  Engineered Variant of Kred from Lactobacillus kefir
atgaccgatcgtctgaagcataaagtagccatcgttaccggcgggacaatgggtatcggtttggcaatcgccgataaatttgtagaggagggtgcgaaagtagttattactggtcgtcacgcggatgtaggtgaaaaagccgccaaatcaatcggcggcactgatgttattcgctttgtccagcacgatgcgtccgaagaagcaggctggacgaaactgttcgacaccaccgaggaggcattcggcccggttacgaccctggtgaacaatgcagggattggggtaattgcgagcgttgaacggactaccacggaggaatggcgtaaaatcctgtccgttaatctggatggtgtttttttcggcacccgtctgggcattcagcgcatgaaaaataaaggcttgggcgctagcatcatcaatatgagcagtattatggggctcgtaggcgctccgactgcaggggcatacaacgcttccaagggggcggtacgtatcatgtcgaaaagcgcagcgctggattgcgcactgaaggactacgatgtgcgtgtcaacacagtacatccgggcgcgatcaagaccccacggaaggatcagctggaaggttgggaggaaatgatgtcacagcgtacgctgacccctatgggccacattggcgaaccgaatgacatcgcatggatctgtgtgtacctggcatctgacgaatcgaaatttgcgacgggtgcagaatttgtggtcgacggcgggtggaccgcacag

SEQ ID NO: 202 - protein, 252 aa, Artificial Sequence
  Engineered Variant of Kred from Lactobacillus kefir
MTDRLKHKVAIVTGGTMGIGLAIADKFVEEGAKVVITGRHADVGEKAAKSIGGTDVIRFVQHDASEEAGWTKLFDTTEEAFGPVTTLVNNAGIGVIASVERTTTEEWRKILSVNLDGVFFGTRLGIQRMKNKGLGASIINMSSIMGLVGAPTAGAYNASKGAVRIMSKSAALDCALKDYDVRVNTVHPGAIKTPRKDQLEGWEEMMSQRTLTPMGHIGEPNDIAWICVYLASDESKFATGAEFVVDGGWTAQ

SEQ ID NO: 203 - DNA, 756 bp, Artificial Sequence
  Engineered Variant of Kred from Lactobacillus kefir
atgaccgatcgtctgaagcataaagtagccatcgttaccggcgggacaatgggtatcggtttggcaatcgccgataaatttgtagaggagggtgcgaaagtagttattactggtcgtcacgcggatgtaggtgaaaaagccgccaaatcaatcggcggcactgatgttattcgctttgtccagcacgatgcgtccgaagaagcaggctggacgaaactgttcgacaccaccgaggaggcattcggcccggttacgaccctggtgaacaatgcagggattggggttattaaaagcgttgaacggactaccacggaggaatggcgtaaaatcctgtccgttaatctggatggtgtttttttcggcacccgtctgggcattcagcgcatgaaaaataaaggcttgggcgctagcatcatcaatatgagctcgatcgcggggctcgtaggcgatccgactgcaggggcatacaacgcttccaagggggcggtacgtatcatgtcgaaaagcgcagcgctggattgcgcactgaaggactacgatgtgcgtgtcaacacagtacatccgggcgcgatcaagaccccacggaaggatcagctggaaggttgggaggaaatgatgtcacagcgtacggcgacccctatgggccacattggcgaaccgaatgacatcgcatggatctgtgtgtacctggcatctgacgaatcgaaatttgcgacgggtgcagaatttgtggtcgacggcgggtggaccgcacag

SEQ ID NO: 204 - protein, 252 aa, Artificial Sequence
  Engineered Variant of Kred from Lactobacillus kefir
MTDRLKHKVAIVTGGTMGIGLAIADKFVEEGAKVVITGRHADVGEKAAKSIGGTDVIRFVQHDASEEAGWTKLFDTTEEAFGPVTTLVNNAGIGVIKSVERTTTEEWRKILSVNLDGVFFGTRLGIQRMKNKGLGASIINMSSIAGLVGDPTAGAYNASKGAVRIMSKSAALDCALKDYDVRVNTVHPGAIKTPRKDQLEGWEEMMSQRTATPMGHIGEPNDIAWICVYLASDESKFATGAEFVVDGGWTAQ

SEQ ID NO: 205 - DNA, 756 bp, Artificial Sequence
  Engineered Variant of Kred from Lactobacillus kefir
atgaccgatcgtctgaagcataaagtagccatcgttaccggcgggacaatgggtatcggtttggcaatcgccgataaatttgtagaggagggtgcgaaagtagttattactggtcgtcacgcggatgtaggtgaaaaagccgccaaatcaatcggcggcactgatgttattcgctttgtccagcacgatgcgtccgaagaagcaggctggacgaaactgttcgacaccaccgaggaggcattcggcccggttacgaccctggtgaacaatgcagggattggggtagccaagagcgttgaacggactaccacggaggaatggcgtaaaatcctgtccgttaatctggatggtgtttttttcggcacccgtctgggcattcagcgcatgaaaaataaaggcttgggcgctagcatcatcaatatgagcagtattatggggctcgtaggcgctccgactgcaggggcatacaacgcttccaagggggcggtacgtatcatgtcgaaaagcgcagcgctggattgcgcactgaaggactacgatgtgcgtgtcaacacagtacatccgggcgcgatcaagaccccacggaaggatcagctggaaggttgggaggaaatgatgtcacagcgtacgctgacccctatgggccacattggcgaaccgaatgacatcgcatggatctgtgtgtacctggcatctgacgaatcgaaatttgcgacgggtgcagaatttgtggtcgacggcgggtggaccgcacag

SEQ ID NO: 206 - protein, 252 aa, Artificial Sequence
  Engineered Variant of Kred from Lactobacillus kefir
MTDRLKHKVAIVTGGTMGIGLAIADKFVEEGAKVVITGRHADVGEKAAKSIGGTDVIRFVQHDASEEAGWTKLFDTTEEAFGPVTTLVNNAGIGVAKSVERTTTEEWRKILSVNLDGVFFGTRLGIQRMKNKGLGASIINMSSIMGLVGAPTAGAYNASKGAVRIMSKSAALDCALKDYDVRVNTVHPGAIKTPRKDQLEGWEEMMSQRTLTPMGHIGEPNDIAWICVYLASDESKFATGAEFVVDGGWTAQ

SEQ ID NO: 207 - DNA, 756 bp, Artificial Sequence
  Engineered Variant of Kred from Lactobacillus kefir
atgaccgatcgtctgaagcataaagtagccatcgttaccggcgggacaatgggtatcggtttggcaatcgccgataaatttgtagaggagggtgcgaaagtagttattactggtcgtcacgcggatgtaggtgaaaaagccgccaaatcaatcggcggcactgatgttattcgctttgtccagcacgatgcgtccgaagaagcaggctggacgaaactgttcgacaccaccgaggaggcattcggcccggttacgaccctggtgaacaatgcagggattggggtaattgcgagcgttgaacggactaccacggaggaatggcgtaaaatcctgtccgttaatctggatggtgtttttttcggcacccgtctgggcattcagcgcatgaaaaataaaggcttgggcgctagcatcatcaatatgagcagtattatggggctcgtaggcgctccgactgcaggggcatacaacgcttccaagggggcggtacgtatcatgtcgaaaagcgcagcgctggattgcgcactgaaggactacgatgtgcgtgtcaacacagtacatccgggcgcgatcaagaccccacggaaggatcagctggaaggttgggaggaagcaatgtcacagcgtacggcgacccctatgggccacattggcgaaccgaatgacatcgcatggatctgtgtgtacctggcatctgacgaatcgaaatttgcgacgggtgcagaatttgtggtcgacggcgggtggaccgcacag

SEQ ID NO: 208 - protein, 252 aa, Artificial Sequence
  Engineered Variant of Kred from Lactobacillus kefir
MTDRLKHKVAIVTGGTMGIGLAIADKFVEEGAKVVITGRHADVGEKAAKSIGGTDVIRFVQHDASEEAGWTKLFDTTEEAFGPVTTLVNNAGIGVIASVERTTTEEWRKILSVNLDGVFFGTRLGIQRMKNKGLGASIINMSSIMGLVGAPTAGAYNASKGAVRIMSKSAALDCALKDYDVRVNTVHPGAIKTPRKDQLEGWEEAMSQRTATPMGHIGEPNDIAWICVYLASDESKFATGAEFVVDGGWTAQ

SEQ ID NO: 209 - DNA, 756 bp, Artificial Sequence
  Engineered Variant of Kred from Lactobacillus kefir
atgaccgatcgtctgaagcataaagtagccatcgttaccggcgggacaatgggtatcggtttggcaatcgccgataaatttgtagaggagggtgcgaaagtagttattactggtcgtcacgcggatgtaggtgaaaaagccgccaaatcaatcggcggcactgatgttattcgctttgtccagcacgatgcgtccgaagaagcaggctggacgaaactgttcgacaccaccgaggaggcattcggcccggttacgaccctggtgaacaatgcagggattggggcaattaagagcgttgaacggactaccacggaggaatggcgtaaaatcctgtccgttaatctggatggtgtttttttcggcacccgtctgggcattcagcgcatgaaaaataaaggcttgggcgctagcatcatcaatatgagcagtattatggggctcgtaggcgctccgactgcaggggcatacaacgcttccaagggggcggtacgtatcatgtcgaaaagcgcagcgctggattgcgcactgaaggactacgatgtgcgtgtcaacacagtacatccgggcgcgatcaagaccccacggaaggatcagctggaaggttgggaggaagcagcttcacagcgtacggcgacccctatgggccacattggcgaaccgaatgacatcgcatggatctgtgtgtacctggcatctgacgaatcgaaatttgcgacgggtgcagaatttgtggtcgacggcgggtggaccgcacag

SEQ ID NO: 210 - protein, 252 aa, Artificial Sequence
  Engineered Variant of Kred from Lactobacillus kefir
MTDRLKHKVAIVTGGTMGIGLAIADKFVEEGAKVVITGRHADVGEKAAKSIGGTDVIRFVQHDASEEAGWTKLFDTTEEAFGPVTTLVNNAGIGAIKSVERTTTEEWRKILSVNLDGVFFGTRLGIQRMKNKGLGASIINMSSIMGLVGAPTAGAYNASKGAVRIMSKSAALDCALKDYDVRVNTVHPGAIKTPRKDQLEGWEEAASQRTATPMGHIGEPNDIAWICVYLASDESKFATGAEFVVDGGWTAQ

SEQ ID NO: 211 - DNA, 756 bp, Artificial Sequence
  Engineered Variant of Kred from Lactobacillus kefir
atgaccgatcgtctgaagcataaagtagccatcgttaccggcgggacaatgggtatcggtttggcaatcgccgataaatttgtagaggagggtgcgaaagtagttattactggtcgtcacgcggatgtaggtgaaaaagccgccaaatcaatcggcggcactgatgttattcgctttgtccagcacgatgcgtccgaagaagcaggctggacgaaactgttcgacaccaccgaggaggcattcggcccggttacgaccctggtgaacaatgcagggattggggtaattgcgagcgttgaacggactaccacggaggaatggcgtaaaatcctgtccgttaatctggatggtgtttttttcggcacccgtctgggcattcagcgcatgaaaaataaaggcttgggcgctagcatcatcaatatgagctcgatcatggggctcgtaggcgctccgactgcaggggcatacaacgcttccaagggggcggtacgtatcatgtcgaaaagcgcagcgctggattgcgcactgaaggactacgatgtgcgtgtcaacacagtacatccgggcgcgatcaagaccccacggaaggatcagctggaaggttgggaggaagcaatgtcacagcgtacgctgacccctatgggccacattggcgaaccgaatgacatcgcatggatctgtgtgtacctggcatctgacgaatcgaaatttgcgacgggtgcagaatttgtggtcgacggcgggtggaccgcacag

SEQ ID NO: 212 - protein, 252 aa, Artificial Sequence
  Engineered Variant of Kred from Lactobacillus kefir
MTDRLKHKVAIVTGGTMGIGLAIADKFVEEGAKVVITGRHADVGEKAAKSIGGTDVIRFVQHDASEEAGWTKLFDTTEEAFGPVTTLVNNAGIGVIASVERTTTEEWRKILSVNLDGVFFGTRLGIQRMKNKGLGASIINMSSIMGLVGAPTAGAYNASKGAVRIMSKSAALDCALKDYDVRVNTVHPGAIKTPRKDQLEGWEEAMSQRTLTPMGHIGEPNDIAWICVYLASDESKFATGAEFVVDGGWTAQ

SEQ ID NO: 213 - DNA, 756 bp, Artificial Sequence
  Engineered Variant of Kred from Lactobacillus kefir
atgaccgatcgtctgaagcataaagtagccatcgttaccggcgggacaatgggtatcggtttggcaatcgccgataaatttgtagaggagggtgcgaaagtagttattactggtcgtcacgcggatgtaggtgaaaaagccgccaaatcaatcggcggcactgatgttattcgctttgtccagcacgatgcgtccgaagaagcaggctggacgaaactgttcgacaccaccgaggaggcattcggcccggttacgaccctggtgaacaatgcagggattggggttattaaaagcgttgaacggactaccacggaggaatggcgtaaaatcctgtccgttaatctggatggtgtttttttcggcacccgtctgggcattcagcgcatgaaaaataaaggcttgggcgctagcatcatcaatatgagctcgatcatggggctcgtaggcgctccgactgcaggggcatacaacgcttccaagggggcggtacgtatcatgtcgaaaagcgcagcgctggattgcgcactgaaggactacgatgtgcgtgtcaacacagtacatccgggcgcgatcaagaccccacggaaggatcagctggaaggttgggaggaaatggcttcacagcgtacggcgacccctatgggccacattggcgaaccgaatgacatcgcatggatctgtgtgtacctggcatctgacgaatcgaaatttgcgacgggtgcagaatttgtggtcgacggcgggtggaccgcacag

SEQ ID NO: 214 - protein, 252 aa, Artificial Sequence
  Engineered Variant of Kred from Lactobacillus kefir
MTDRLKHKVAIVTGGTMGIGLAIADKFVEEGAKVVITGRHADVGEKAAKSIGGTDVIRFVQHDASEEAGWTKLFDTTEEAFGPVTTLVNNAGIGVIKSVERTTTEEWRKILSVNLDGVFFGTRLGIQRMKNKGLGASIINMSSIMGLVGAPTAGAYNASKGAVRIMSKSAALDCALKDYDVRVNTVHPGAIKTPRKDQLEGWEEMASQRTATPMGHIGEPNDIAWICVYLASDESKFATGAEFVVDGGWTAQ

SEQ ID NO: 215 - DNA, 756 bp, Artificial Sequence
  Engineered Variant of Kred from Lactobacillus kefir
atgaccgatcgtctgaagcataaagtagccatcgttaccggcgggacaatgggtatcggtttggcaatcgccgataaatttgtagaggagggtgcgaaagtagttattactggtcgtcacgcggatgtaggtgaaaaagccgccaaatcaatcggcggcactgatgttattcgctttgtccagcacgatgcgtccgaagaagcaggctggacgaaactgttcgacaccaccgaggaggcattcggcccggttacgaccctggtgaacaatgcagggattggggttattaaaagcgttgaacggactaccacggaggaatggcgtaaaatcctgtccgttaatctggatggtgtttttttcggcacccgtctgggcattcagcgcatgaaaaataaaggcttgggcgctagcatcatcaatatgagcagtattatggggctcgtaggcgctccgactgcaggggcatacaacgcttccaagggggcggtacgtatcatgtcgaaaagcgcagcgctggattgcgcactgaaggactacgatgtgcgtgtcaacacagtacatccgggcgcgatcaagaccccacggaaggatcagctggaaggttgggaggaaatggcttcacagcgtacggcgacccctatgggccacattggcgaaccgaatgacatcgcatggatctgtgtgtacctggcatctgacgaatcgaaatttgcgacgggtgcagaatttgtggtcgacggcgggtggaccgcacag

SEQ ID NO: 216 - protein, 252 aa, Artificial Sequence; identical to SEQ ID NO: 214
  Engineered Variant of Kred from Lactobacillus kefir

SEQ ID NO: 217 - DNA, 756 bp, Artificial Sequence
  Engineered Variant of Kred from Lactobacillus kefir
atgaccgatcgtctgaagcataaagtagccatcgttaccggcgggacaatgggtatcggtttggcaatcgccgataaatttgtagaggagggtgcgaaagtagttattactggtcgtcacgcggatgtaggtgaaaaagccgccaaatcaatcggcggcactgatgttattcgctttgtccagcacgatgcgtccgaagaagcaggctggacgaaactgttcgacaccaccgaggaggcattcggcccggttacgaccctggtgaacaatgcagggattggggcagccgcgagcgttgaacggactaccacggaggaatggcgtaaaatcctgtccgttaatctggatggtgtttttttcggcacccgtctgggcattcagcgcatgaaaaataaaggcttgggcgctagcatcatcaatatgagcagtattatggggctcgtaggcgctccgactgcaggggcatacaacgcttccaagggggcggtacgtatcatgtcgaaaagcgcagcgctggattgcgcactgaaggactacgatgtgcgtgtcaacacagtacatccgggcgcgatcaagaccccacggaaggatcagctggaaggttgggaggaagcaatgtcacagcgtacgctgacccctatgggccacattggcgaaccgaatgacatcgcatggatctgtgtgtacctggcatctgacgaatcgaaatttgcgacgggtgcagaatttgtggtcgacggcgggtggaccgcacag

SEQ ID NO: 218 - protein, 252 aa, Artificial Sequence
  Engineered Variant of Kred from Lactobacillus kefir
MTDRLKHKVAIVTGGTMGIGLAIADKFVEEGAKVVITGRHADVGEKAAKSIGGTDVIRFVQHDASEEAGWTKLFDTTEEAFGPVTTLVNNAGIGAAASVERTTTEEWRKILSVNLDGVFFGTRLGIQRMKNKGLGASIINMSSIMGLVGAPTAGAYNASKGAVRIMSKSAALDCALKDYDVRVNTVHPGAIKTPRKDQLEGWEEAMSQRTLTPMGHIGEPNDIAWICVYLASDESKFATGAEFVVDGGWTAQ

SEQ ID NO: 219 - DNA, 756 bp, Artificial Sequence
  Engineered Variant of Kred from Lactobacillus kefir
atgaccgatcgtctgaagcataaagtagccatcgttaccggcgggacaatgggtatcggtttggcaatcgccgataaatttgtagaggagggtgcgaaagtagttattactggtcgtcacgcggatgtaggtgaaaaagccgccaaatcaatcggcggcactgatgttattcgctttgtccagcacgatgcgtccgaagaagcaggctggacgaaactgttcgacaccaccgaggaggcattcggcccggttacgaccctggtgaacaatgcagggattggggcaattgcgagcgttgaacggactaccacggaggaatggcgtaaaatcctgtccgttaatctggatggtgtttttttcggcacccgtctgggcattcagcgcatgaaaaataaaggcttgggcgctagcatcatcaatatgagcgcgatcgcggggctcgtaggcgctccgactgcaggggcatacaacgcttccaagggggcggtacgtatcatgtcgaaaagcgcagcgctggattgcgcactgaaggactacgatgtgcgtgtcaacacagtacatccgggcgcgatcaagaccccacggaaggatcagctggaaggtgctgaggaagcaatgtcacagcgtacgctgacccctatgggccacattggcgaaccgaatgacatcgcatggatctgtgtgtacctggcatctgacgaatcgaaatttgcgacgggtgcagaatttgtggtcgacggcgggtggaccgcacag

SEQ ID NO: 220 - protein, 252 aa, Artificial Sequence
  Engineered Variant of Kred from Lactobacillus kefir
MTDRLKHKVAIVTGGTMGIGLAIADKFVEEGAKVVITGRHADVGEKAAKSIGGTDVIRFVQHDASEEAGWTKLFDTTEEAFGPVTTLVNNAGIGAIASVERTTTEEWRKILSVNLDGVFFGTRLGIQRMKNKGLGASIINMSAIAGLVGAPTAGAYNASKGAVRIMSKSAALDCALKDYDVRVNTVHPGAIKTPRKDQLEGAEEAMSQRTLTPMGHIGEPNDIAWICVYLASDESKFATGAEFVVDGGWTAQ

SEQ ID NO: 221 - DNA, 756 bp, Artificial Sequence
  Engineered Variant of Kred from Lactobacillus kefir
atgaccgatcgtctgaagcataaagtagccatcgttaccggcgggacaatgggtatcggtttggcaatcgccgataaatttgtagaggagggtgcgaaagtagttattactggtcgtcacgcggatgtaggtgaaaaagccgccaaatcaatcggcggcactgatgttattcgctttgtccagcacgatgcgtccgaagaagcaggctggacgaaactgttcgacaccaccgaggaggcattcggcccggttacgaccctggtgaacaatgcagggattggggtaattgcgagcgttgaacggactaccacggaggaatggcgtaaaatcctgtccgttaatctggatggtgtttttttcggcacccgtctgggcattcagcgcatgaaaaataaaggcttgggcgctagcatcatcaatatgagcagtattatggggctcgtaggcgctccgactgcaggggcatacaacgcttccaagggggcggtacgtatcatgtcgaaaagcgcagcgctggattgcgcactgaaggactacgatgtgcgtgtcaacacagtacatccgggcgcgatcaagaccccacggaaggatcagctggaaggttgggaggaaatggcttcacagcgtacgctgacccctatgggccacattggcgaaccgaatgacatcgcatggatctgtgtgtacctggcatctgacgaatcgaaatttgcgacgggtgcagaatttgtggtcgacggcgggtggaccgcacag

SEQ ID NO: 222 - protein, 252 aa, Artificial Sequence
  Engineered Variant of Kred from Lactobacillus kefir
MTDRLKHKVAIVTGGTMGIGLAIADKFVEEGAKVVITGRHADVGEKAAKSIGGTDVIRFVQHDASEEAGWTKLFDTTEEAFGPVTTLVNNAGIGVIASVERTTTEEWRKILSVNLDGVFFGTRLGIQRMKNKGLGASIINMSSIMGLVGAPTAGAYNASKGAVRIMSKSAALDCALKDYDVRVNTVHPGAIKTPRKDQLEGWEEMASQRTLTPMGHIGEPNDIAWICVYLASDESKFATGAEFVVDGGWTAQ

SEQ ID NO: 223 - DNA, 756 bp, Artificial Sequence
  Engineered Variant of Kred from Lactobacillus kefir
atgaccgatcgtctgaagcataaagtagccatcgttaccggcgggacaatgggtatcggtttggcaatcgccgataaatttgtagaggagggtgcgaaagtagttattactggtcgtcacgcggatgtaggtgaaaaagccgccaaatcaatcggcggcactgatgttattcgctttgtccagcacgatgcgtccgaagaagcaggctggacgaaactgttcgacaccaccgaggaggcattcggcccggttacgaccctggtgaacaatgcagggattggggcaattgcgagcgttgaacggactaccacggaggaatggcgtaaaatcctgtccgttaatctggatggtgtttttttcggcacccgtctgggcattcagcgcatgaaaaataaaggcttgggcgctagcatcatcaatatgagcagtattatggggctcgtaggcgctccgactgcaggggcatacaacgcttccaagggggcggtacgtatcatgtcgaaaagcgcagcgctggattgcgcactgaaggactacgatgtgcgtgtcaacacagtacatccgggcgcgatcaagaccccacggaaggatcagctggaaggtgctgaggaagcagcttcacagcgtacgctgacccctatgggccacattggcgaaccgaatgacatcgcatggatctgtgtgtacctggcatctgacgaatcgaaatttgcgacgggtgcagaatttgtggtcgacggcgggtggaccgcacag

SEQ ID NO: 224 - protein, 252 aa, Artificial Sequence
  Engineered Variant of Kred from Lactobacillus kefir
MTDRLKHKVAIVTGGTMGIGLAIADKFVEEGAKVVITGRHADVGEKAAKSIGGTDVIRFVQHDASEEAGWTKLFDTTEEAFGPVTTLVNNAGIGAIASVERTTTEEWRKILSVNLDGVFFGTRLGIQRMKNKGLGASIINMSSIMGLVGAPTAGAYNASKGAVRIMSKSAALDCALKDYDVRVNTVHPGAIKTPRKDQLEGAEEAASQRTLTPMGHIGEPNDIAWICVYLASDESKFATGAEFVVDGGWTAQ

SEQ ID NO: 225 - DNA, 756 bp, Artificial Sequence
  Engineered Variant of Kred from Lactobacillus kefir
atgaccgatcgtctgaagcataaagtagccatcgttaccggcgggacaatgggtatcggtttggcaatcgccgataaatttgtagaggagggtgcgaaagtagttattactggtcgtcacgcggatgtaggtgaaaaagccgccaaatcaatcggcggcactgatgttattcgctttgtccagcacgatgcgtccgaagaagcaggctggacgaaactgttcgacaccaccgaggaggcattcggcccggttacgaccctggtgaacaatgcagggattggggtaattaagagcgttgaacggactaccacggaggaatggcgtaaaatcctgtccgttaatctggatggtgtttttttcggcacccgtctgggcattcagcgcatgaaaaataaaggcttgggcgctagcatcatcaatatgagcgcggcggcggggctcgtaggcgctccgactgcaggggcatacaacgcttccaagggggcggtacgtatcatgtcgaaaagcgcagcgctggattgcgcactgaaggactacgatgtgcgtgtcaacacagtacatccgggcgcgatcaagaccccacggaaggatcagctggaaggtgctgaggaagcaatgtcacagcgtacgctgacccctatgggccacattggcgaaccgaatgacatcgcatggatctgtgtgtacctggcatctgacgaatcgaaatttgcgacgggtgcagaatttgtggtcgacggcggggcaaccgcacag

SEQ ID NO: 226 - protein, 252 aa, Artificial Sequence
  Engineered Variant of Kred from Lactobacillus kefir
MTDRLKHKVAIVTGGTMGIGLAIADKFVEEGAKVVITGRHADVGEKAAKSIGGTDVIRFVQHDASEEAGWTKLFDTTEEAFGPVTTLVNNAGIGVIKSVERTTTEEWRKILSVNLDGVFFGTRLGIQRMKNKGLGASIINMSAAAGLVGAPTAGAYNASKGAVRIMSKSAALDCALKDYDVRVNTVHPGAIKTPRKDQLEGAEEAMSQRTLTPMGHIGEPNDIAWICVYLASDESKFATGAEFVVDGGATAQ

SEQ ID NO: 227 - DNA, 756 bp, Artificial Sequence
  Engineered Variant of Kred from Lactobacillus kefir
atgaccgatcgtctgaagcataaagtagccatcgttaccggcgggacaatgggtatcggtttggcaatcgccgataaatttgtagaggagggtgcgaaagtagttattactggtcgtcacgcggatgtaggtgaaaaagccgccaaatcaatcggcggcactgatgttattcgctttgtccagcacgatgcgtccgaagaagcaggctggacgaaactgttcgacaccaccgaggaggcattcggcccggttacgaccctggtgaacaatgcagggattggggttattaaaagcgttgaacggactaccacggaggaatggcgtaaaatcctgtccgttaatctggatggtgtttttttcggcacccgtctgggcattcagcgcatgaaaaataaaggcttgggcgctagcatcatcaatatgagcgcgatcgcggggctcgtaggcgctccgactgcaggggcatacaacgcttccaagggggcggtacgtatcatgtcgaaaagcgcagcgctggattgcgcactgaaggactacgatgtgcgtgtcaacacagtacatccgggcgcgatcaagaccccacggaaggatcagctggaaggttgggaggaaatgatgtcacagcgtacgctgacccctatgggccacattggcgaaccgaatgacatcgcatggatctgtgtgtacctggcatctgacgaatcgaaatttgcgacgggtgcagaatttgtggtcgacggcgggtggaccgcacag

SEQ ID NO: 228 - protein, 252 aa, Artificial Sequence
  Engineered Variant of Kred from Lactobacillus kefir
MTDRLKHKVAIVTGGTMGIGLAIADKFVEEGAKVVITGRHADVGEKAAKSIGGTDVIRFVQHDASEEAGWTKLFDTTEEAFGPVTTLVNNAGIGVIKSVERTTTEEWRKILSVNLDGVFFGTRLGIQRMKNKGLGASIINMSAIAGLVGAPTAGAYNASKGAVRIMSKSAALDCALKDYDVRVNTVHPGAIKTPRKDQLEGWEEMMSQRTLTPMGHIGEPNDIAWICVYLASDESKFATGAEFVVDGGWTAQ

SEQ ID NO: 229 - DNA, 756 bp, Artificial Sequence
  Engineered Variant of Kred from Lactobacillus kefir
atgaccgatcgtctgaagcataaagtagccatcgttaccggcgggacaatgggtatcggtttggcaatcgccgataaatttgtagaggagggtgcgaaagtagttattactggtcgtcacgcggatgtaggtgaaaaagccgccaaatcaatcggcggcactgatgttattcgctttgtccagcacgatgcgtccgaagaagcaggctggacgaaactgttcgacaccaccgaggaggcattcggcccggttacgaccctggtgaacaatgcagggattggggcaattgcgagcgttgaacggactaccacggaggaatggcgtaaaatcctgtccgttaatctggatggtgtttttttcggcacccgtctgggcattcagcgcatgaaaaataaaggcttgggcgctagcatcatcaatatgagcgcgatcgcggggctcgtaggcgctccgactgcaggggcatacaacgcttccaagggggcggtacgtatcatgtcgaaaagcgcagcgctggattgcgcactgaaggactacgatgtgcgtgtcaacacagtacatccgggcgcgatcaagaccccacggaaggatcagctggaaggttgggaggaaatgatgtcacagcgtacgctgacccctatgggccacattggcgaaccgaatgacatcgcatggatctgtgtgtacctggcatctgacgaatcgaaatttgcgacgggtgcagaatttgtggtcgacggcggggcaaccgcacag

SEQ ID NO: 230 - protein, 252 aa, Artificial Sequence
  Engineered Variant of Kred from Lactobacillus kefir
MTDRLKHKVAIVTGGTMGIGLAIADKFVEEGAKVVITGRHADVGEKAAKSIGGTDVIRFVQHDASEEAGWTKLFDTTEEAFGPVTTLVNNAGIGAIASVERTTTEEWRKILSVNLDGVFFGTRLGIQRMKNKGLGASIINMSAIAGLVGAPTAGAYNASKGAVRIMSKSAALDCALKDYDVRVNTVHPGAIKTPRKDQLEGWEEMMSQRTLTPMGHIGEPNDIAWICVYLASDESKFATGAEFVVDGGATAQ

SEQ ID NO: 231 - DNA, 756 bp, Artificial Sequence
  Engineered Variant of Kred from Lactobacillus kefir
atgaccgatcgtctgaagcataaagtagccatcgttaccggcgggacaatgggtatcggtttggcaatcgccgataaatttgtagaggagggtgcgaaagtagttattactggtcgtcacgcggatgtaggtgaaaaagccgccaaatcaatcggcggcactgatgttattcgctttgtccagcacgatgcgtccgaagaagcaggctggacgaaactgttcgacaccaccgaggaggcattcggcccggttacgaccctggtgaacaatgcagggattggggtagccaagagcgttgaacggactaccacggaggaatggcgtaaaatcctgtccgttaatctggatggtgtttttttcggcacccgtctgggcattcagcgcatgaaaaataaaggcttgggcgctagcatcatcaatatgagctcgatcatggggctcgtaggcgctccgactgcaggggcatacaacgcttccaagggggcggtacgtatcatgtcgaaaagcgcagcgctggattgcgcactgaaggactacgatgtgcgtgtcaacacagtacatccgggcgcgatcaagaccccacggaaggatcagctggaaggttgggaggaaatggcttcacagcgtacgctgacccctatgggccacattggcgaaccgaatgacatcgcatggatctgtgtgtacctggcatctgacgaatcgaaatttgcgacgggtgcagaatttgtggtcgacggcgggtggaccgcacag

SEQ ID NO: 232 - protein, 252 aa, Artificial Sequence
  Engineered Variant of Kred from Lactobacillus kefir
MTDRLKHKVAIVTGGTMGIGLAIADKFVEEGAKVVITGRHADVGEKAAKSIGGTDVIRFVQHDASEEAGWTKLFDTTEEAFGPVTTLVNNAGIGVAKSVERTTTEEWRKILSVNLDGVFFGTRLGIQRMKNKGLGASIINMSSIMGLVGAPTAGAYNASKGAVRIMSKSAALDCALKDYDVRVNTVHPGAIKTPRKDQLEGWEEMASQRTLTPMGHIGEPNDIAWICVYLASDESKFATGAEFVVDGGWTAQ

SEQ ID NO: 233 - DNA, 756 bp, Artificial Sequence
  Engineered Variant of Kred from Lactobacillus kefir
atgaccgatcgtctgaagcataaagtagccatcgttaccggcgggacaatgggtatcggtttggcaatcgccgataaatttgtagaggagggtgcgaaagtagttattactggtcgtcacgcggatgtaggtgaaaaagccgccaaatcaatcggcggcactgatgttattcgctttgtccagcacgatgcgtccgaagaagcaggctggacgaaactgttcgacaccaccgaggaggcattcggcccggttacgaccctggtgaacaatgcagggattggggtaattaagagcgttgaacggactaccacggaggaatggcgtaaaatcctgtccgttaatctggatggtgtttttttcggcacccgtctgggcattcagcgcatgaaaaataaaggcttgggcgctagcatcatcaatatgagctcggcgatggggctcgtaggcgctccgactgcaggggcatacaacgcttccaagggggcggtacgtatcatgtcgaaaagcgcagcgctggattgcgcactgaaggactacgatgtgcgtgtcaacacagtacatccgggcgcgatcaagaccccacggaaggatcagctggaaggtgctgaggaagcagcttcacagcgtacgctgacccctatgggccacattggcgaaccgaatgacatcgcatggatctgtgtgtacctggcatctgacgaatcgaaatttgcgacgggtgcagaatttgtggtcgacggcgggtggaccgcacag

SEQ ID NO: 234 - protein, 252 aa, Artificial Sequence
  Engineered Variant of Kred from Lactobacillus kefir
MTDRLKHKVAIVTGGTMGIGLAIADKFVEEGAKVVITGRHADVGEKAAKSIGGTDVIRFVQHDASEEAGWTKLFDTTEEAFGPVTTLVNNAGIGVIKSVERTTTEEWRKILSVNLDGVFFGTRLGIQRMKNKGLGASIINMSSAMGLVGAPTAGAYNASKGAVRIMSKSAALDCALKDYDVRVNTVHPGAIKTPRKDQLEGAEEAASQRTLTPMGHIGEPNDIAWICVYLASDESKFATGAEFVVDGGWTAQ

SEQ ID NO: 235 - DNA, 756 bp, Artificial Sequence
  Engineered Variant of Kred from Lactobacillus kefir
atgaccgatcgtctgaagcataaagtagccatcgttaccggcgggacaatgggtatcggtttggcaatcgccgataaatttgtagaggagggtgcgaaagtagttattactggtcgtcacgcggatgtaggtgaaaaagccgccaaatcaatcggcggcactgatgttattcgctttgtccagcacgatgcgtccgaagaagcaggctggacgaaactgttcgacaccaccgaggaggcattcggcccggttacgaccctggtgaacaatgcagggattggggcagccaagagcgttgaacggactaccacggaggaatggcgtaaaatcctgtccgttaatctggatggtgtttttttcggcacccgtctgggcattcagcgcatgaaaaataaaggcttgggcgctagcatcatcaatatgagcagtattatggggctcgtaggcgctccgactgcaggggcatacaacgcttccaagggggcggtacgtatcatgtcgaaaagcgcagcgctggattgcgcactgaaggactacgatgtgcgtgtcaacacagtacatccgggcgcgatcaagaccccacggaaggatcagctggaaggttgggaggaagcagcttcacagcgtacggcgacccctatgggccacattggcgaaccgaatgacatcgcatggatctgtgtgtacctggcatctgacgaatcgaaatttgcgacgggtgcagaatttgtggtcgacggcggggcaaccgcacag

SEQ ID NO: 236 - protein, 252 aa, Artificial Sequence
  Engineered Variant of Kred from Lactobacillus kefir
MTDRLKHKVAIVTGGTMGIGLAIADKFVEEGAKVVITGRHADVGEKAAKSIGGTDVIRFVQHDASEEAGWTKLFDTTEEAFGPVTTLVNNAGIGAAKSVERTTTEEWRKILSVNLDGVFFGTRLGIQRMKNKGLGASIINMSSIMGLVGAPTAGAYNASKGAVRIMSKSAALDCALKDYDVRVNTVHPGAIKTPRKDQLEGWEEAASQRTATPMGHIGEPNDIAWICVYLASDESKFATGAEFVVDGGATAQ

SEQ ID NO: 237 - DNA, 756 bp, Artificial Sequence
  Engineered Variant of Kred from Lactobacillus kefir
atgaccgatcgtctgaagcataaagtagccatcgttaccggcgggacaatgggtatcggtttggcaatcgccgataaatttgtagaggagggtgcgaaagtagttattactggtcgtcacgcggatgtaggtgaaaaagccgccaaatcaatcggcggcactgatgttattcgctttgtccagcacgatgcgtccgaagaagcaggctggacgaaactgttcgacaccaccgaggaggcattcggcccggttacgaccctggtgaacaatgcagggattggggcaattaagagcgttgaacggactaccacggaggaatggcgtaaaatcctgtccgttaatctggatggtgtttttttcggcacccgtctgggcattcagcgcatgaaaaataaaggcttgggcgctagcatcatcaatatgagctcgatcatggggctcgtaggcgctccgactgcaggggcatacaacgcttccaagggggcggtacgtatcatgtcgaaaagcgcagcgctggattgcgcactgaaggactacgatgtgcgtgtcaacacagtacatccgggcgcgatcaagaccccacggaaggatcagctggaaggttgggaggaaatggcttcacagcgtacgctgacccctatgggccacattggcgaaccgaatgacatcgcatggatctgtgtgtacctggcatctgacgaatcgaaatttgcgacgggtgcagaatttgtggtcgacggcggggcaaccgcacag

SEQ ID NO: 238 - protein, 252 aa, Artificial Sequence
  Engineered Variant of Kred from Lactobacillus kefir
MTDRLKHKVAIVTGGTMGIGLAIADKFVEEGAKVVITGRHADVGEKAAKSIGGTDVIRFVQHDASEEAGWTKLFDTTEEAFGPVTTLVNNAGIGAIKSVERTTTEEWRKILSVNLDGVFFGTRLGIQRMKNKGLGASIINMSSIMGLVGAPTAGAYNASKGAVRIMSKSAALDCALKDYDVRVNTVHPGAIKTPRKDQLEGWEEMASQRTLTPMGHIGEPNDIAWICVYLASDESKFATGAEFVVDGGATAQ

SEQ ID NO: 239 - DNA, 756 bp, Artificial Sequence
  Engineered Variant of Kred from Lactobacillus kefir
atgaccgatcgtctgaagcataaagtagccatcgttaccggcgggacaatgggtatcggtttggcaatcgccgataaatttgtagaggagggtgcgaaagtagttattactggtcgtcacgcggatgtaggtgaaaaagccgccaaatcaatcggcggcactgatgttattcgctttgtccagcacgatgcgtccgaagaagcaggctggacgaaactgttcgacaccaccgaggaggcattcggcccggttacgaccctggtgaacaatgcagggattggggttattaaaagcgttgaacggactaccacggaggaatggcgtaaaatcctgtccgttaatctggatggtgtttttttcggcacccgtctgggcattcagcgcatgaaaaataaaggcttgggcgctagcatcatcaatatgagctcggcggcggggctcgtaggcgctccgactgcaggggcatacaacgcttccaagggggcggtacgtatcatgtcgaaaagcgcagcgctggattgcgcactgaaggactacgatgtgcgtgtcaacacagtacatccgggcgcgatcaagaccccacggaaggatcagctggaaggttgggaggaagcagcttcacagcgtacgctgacccctatgggccacattggcgaaccgaatgacatcgcatggatctgtgtgtacctggcatctgacgaatcgaaatttgcgacgggtgcagaatttgtggtcgacggcgggtggaccgcacag

SEQ ID NO: 240 - protein, 252 aa, Artificial Sequence
  Engineered Variant of Kred from Lactobacillus kefir
MTDRLKHKVAIVTGGTMGIGLAIADKFVEEGAKVVITGRHADVGEKAAKSIGGTDVIRFVQHDASEEAGWTKLFDTTEEAFGPVTTLVNNAGIGVIKSVERTTTEEWRKILSVNLDGVFFGTRLGIQRMKNKGLGASIINMSSAAGLVGAPTAGAYNASKGAVRIMSKSAALDCALKDYDVRVNTVHPGAIKTPRKDQLEGWEEAASQRTLTPMGHIGEPNDIAWICVYLASDESKFATGAEFVVDGGWTAQ

SEQ ID NO: 241 - DNA, 756 bp, Artificial Sequence
  Engineered Variant of Kred from Lactobacillus kefir
atgaccgatcgtctgaagcataaagtagccatcgttaccggcgggacaatgggtatcggtttggcaatcgccgataaatttgtagaggagggtgcgaaagtagttattactggtcgtcacgcggatgtaggtgaaaaagccgccaaatcaatcggcggcactgatgttattcgctttgtccagcacgatgcgtccgaagaagcaggctggacgaaactgttcgacaccaccgaggaggcattcggcccggttacgaccctggtgaacaatgcagggattggggttattaaaagcgttgaacggactaccacggaggaatggcgtaaaatcctgtccgttaatctggatggtgtttttttcggcacccgtctgggcattcagcgcatgaaaaataaaggcttgggcgctagcatcatcaatatgagctcgatcgcggggctcgtaggcgctccgactgcaggggcatacaacgcttccaagggggcggtacgtatcatgtcgaaaagcgcagcgctggattgcgcactgaaggactacgatgtgcgtgtcaacacagtacatccgggcgcgatcaagaccccacggaaggatcagctggaaggttgggaggaaatggcttcacagcgtacgctgacccctatgggccacattggcgaaccgaatgacatcgcatggatctgtgtgtacctggcatctgacgaatcgaaatttgcgacgggtgcagaatttgtggtcgacggcggggcaaccgcacag

SEQ ID NO: 242 - protein, 252 aa, Artificial Sequence
  Engineered Variant of Kred from Lactobacillus kefir
MTDRLKHKVAIVTGGTMGIGLAIADKFVEEGAKVVITGRHADVGEKAAKSIGGTDVIRFVQHDASEEAGWTKLFDTTEEAFGPVTTLVNNAGIGVIKSVERTTTEEWRKILSVNLDGVFFGTRLGIQRMKNKGLGASIINMSSIAGLVGAPTAGAYNASKGAVRIMSKSAALDCALKDYDVRVNTVHPGAIKTPRKDQLEGWEEMASQRTLTPMGHIGEPNDIAWICVYLASDESKFATGAEFVVDGGATAQ

SEQ ID NO: 243 - DNA, 756 bp, Artificial Sequence
  Engineered Variant of Kred from Lactobacillus kefir
atgaccgatcgtctgaagcataaagtagccatcgttaccggcgggacaatgggtatcggtttggcaatcgccgataaatttgtagaggagggtgcgaaagtagttattactggtcgtcacgcggatgtaggtgaaaaagccgccaaatcaatcggcggcactgatgttattcgctttgtccagcacgatgcgtccgaagaagcaggctggacgaaactgttcgacaccaccgaggaggcattcggcccggttacgaccctggtgaacaatgcagggattggggttattaaaagcgttgaacggactaccacggaggaatggcgtaaaatcctgtccgttaatctggatggtgtttttttcggcacccgtctgggcattcagcgcatgaaaaataaaggcttgggcgctagcatcatcaatatgagcagtattatggggctcgtaggcgctccgactgcaggggcatacaacgcttccaagggggcggtacgtatcatgtcgaaaagcgcagcgctggattgcgcactgaaggactacgatgtgcgtgtcaacacagtacatccgggcgcgatcaagaccccacggaaggatcagctggaaggttgggaggaaatgatgtcacagcgtacgctgacccctatgggccacattggcgaaccgaatgacatcgcatggatctgtgtgtacctggcatctgacgaatcgaaatttgcgacgggtgcagaatttgtggtcgacggcggggcaaccgcacag

SEQ ID NO: 244 - protein, 252 aa, Artificial Sequence
  Engineered Variant of Kred from Lactobacillus kefir
MTDRLKHKVAIVTGGTMGIGLAIADKFVEEGAKVVITGRHADVGEKAAKSIGGTDVIRFVQHDASEEAGWTKLFDTTEEAFGPVTTLVNNAGIGVIKSVERTTTEEWRKILSVNLDGVFFGTRLGIQRMKNKGLGASIINMSSIMGLVGAPTAGAYNASKGAVRIMSKSAALDCALKDYDVRVNTVHPGAIKTPRKDQLEGWEEMMSQRTLTPMGHIGEPNDIAWICVYLASDESKFATGAEFVVDGGATAQ

SEQ ID NO: 245 - DNA, 756 bp, Artificial Sequence
  Engineered Variant of Kred from Lactobacillus kefir
atgaccgatcgtctgaagcataaagtagccatcgttaccggcgggacaatgggtatcggtttggcaatcgccgataaatttgtagaggagggtgcgaaagtagttattactggtcgtcacgcggatgtaggtgaaaaagccgccaaatcaatcggcggcactgatgttattcgctttgtccagcacgatgcgtccgaagaagcaggctggacgaaactgttcgacaccaccgaggaggcattcggcccggttacgaccctggtgaacaatgcagggattggggttattaaaagcgttgaacggactaccacggaggaatggcgtaaaatcctgtccgttaatctggatggtgtttttttcggcacccgtctgggcattcagcgcatgaaaaataaaggcttgggcgctagcatcatcaatatgagctcggcgatggggctcgtaggcgctccgactgcaggggcatacaacgcttccaagggggcggtacgtatcatgtcgaaaagcgcagcgctggattgcgcactgaaggactacgatgtgcgtgtcaacacagtacatccgggcgcgatcaagaccccacggaaggatcagctggaaggttgggaggaaatgatgtcacagcgtacgctgacccctatgggccacattggcgaaccgaatgacatcgcatggatctgtgtgtacctggcatctgacgaatcgaaatttgcgacgggtgcagaatttgtggtcgacggcgggtggaccgcacag

SEQ ID NO: 246 - protein, 252 aa, Artificial Sequence
  Engineered Variant of Kred from Lactobacillus kefir
MTDRLKHKVAIVTGGTMGIGLAIADKFVEEGAKVVITGRHADVGEKAAKSIGGTDVIRFVQHDASEEAGWTKLFDTTEEAFGPVTTLVNNAGIGVIKSVERTTTEEWRKILSVNLDGVFFGTRLGIQRMKNKGLGASIINMSSAMGLVGAPTAGAYNASKGAVRIMSKSAALDCALKDYDVRVNTVHPGAIKTPRKDQLEGWEEMMSQRTLTPMGHIGEPNDIAWICVYLASDESKFATGAEFVVDGGWTAQ

SEQ ID NO: 247 - DNA, 756 bp, Artificial Sequence
  Engineered Variant of Kred from Lactobacillus kefir
atgaccgatcgtctgaagcataaagtagccatcgttaccggcgggacaatgggtatcggtttggcaatcgccgataaatttgtagaggagggtgcgaaagtagttattactggtcgtcacgcggatgtaggtgaaaaagccgccaaatcaatcggcggcactgatgttattcgctttgtccagcacgatgcgtccgaagaagcaggctggacgaaactgttcgacaccaccgaggaggcattcggcccggttacgaccctggtgaacaatgcagggattggggttattaaaagcgttgaacggactaccacggaggaatggcgtaaaatcctgtccgttaatctggatggtgtttttttcggcacccgtctgggcattcagcgcatgaaaaataaaggcttgggcgctagcatcatcaatatgagcagtattatggggctcgtaggcgctccgactgcaggggcatacaacgcttccaagggggcggtacgtatcatgtcgaaaagcgcagcgctggattgcgcactgaaggactacgatgtgcgtgtcaacacagtacatccgggcgcgatcaagaccccacggaaggatcagctggaaggtgctgaggaaatggcttcacagcgtacgctgacccctatgggccacattggcgaaccgaatgacatcgcatggatctgtgtgtacctggcatctgacgaatcgaaatttgcgacgggtgcagaatttgtggtcgacggcggggcaaccgcacag

SEQ ID NO: 248 - protein, 252 aa, Artificial Sequence
  Engineered Variant of Kred from Lactobacillus kefir
MTDRLKHKVAIVTGGTMGIGLAIADKFVEEGAKVVITGRHADVGEKAAKSIGGTDVIRFVQHDASEEAGWTKLFDTTEEAFGPVTTLVNNAGIGVIKSVERTTTEEWRKILSVNLDGVFFGTRLGIQRMKNKGLGASIINMSSIMGLVGAPTAGAYNASKGAVRIMSKSAALDCALKDYDVRVNTVHPGAIKTPRKDQLEGAEEMASQRTLTPMGHIGEPNDIAWICVYLASDESKFATGAEFVVDGGATAQ

SEQ ID NO: 249 - DNA, 756 bp, Artificial Sequence
  Engineered Variant of Kred from Lactobacillus kefir
atgaccgatcgtctgaagcataaagtagccatcgttaccggcgggacaatgggtatcggtttggcaatcgccgataaatttgtagaggagggtgcgaaagtagttattactggtcgtcacgcggatgtaggtgaaaaagccgccaaatcaatcggcggcactgatgttattcgctttgtccagcacgatgcgtccgaagaagcaggctggacgaaactgttcgacaccaccgaggaggcattcggcccggttacgaccctggtgaacaatgcagggattggggcaattaagagcgttgaacggactaccacggaggaatggcgtaaaatcctgtccgttaatctggatggtgtttttttcggcacccgtctgggcattcagcgcatgaaaaataaaggcttgggcgctagcatcatcaatatgagcagtattatggggctcgtaggcgctccgactgcaggggcatacaacgcttccaagggggcggtacgtatcatgtcgaaaagcgcagcgctggattgcgcactgaaggactacgatgtgcgtgtcaacacagtacatccgggcgcgatcaagaccccacggaaggatcagctggaaggttgggaggaaatggcttcacagcgtacgctgacccctatgggccacattggcgaaccgaatgacatcgcatggatctgtgtgtacctggcatctgacgaatcgaaatttgcgacgggtgcagaatttgtggtcgacggcggggcaaccgcacag

SEQ ID NO: 250 - protein, 252 aa, Artificial Sequence; identical to SEQ ID NO: 238
  Engineered Variant of Kred from Lactobacillus kefir

SEQ ID NO: 251 - DNA, 756 bp, Artificial Sequence
  Engineered Variant of Kred from Lactobacillus kefir
atgaccgatcgtctgaagcataaagtagccatcgttaccggcgggacaatgggtatcggtttggcaatcgccgataaatttgtagaggagggtgcgaaagtagttattactggtcgtcacgcggatgtaggtgaaaaagccgccaaatcaatcggcggcactgatgttattcgctttgtccagcacgatgcgtccgaagaagcaggctggacgaaactgttcgacaccaccgaggaggcattcggcccggttacgaccctggtgaacaatgcagggattggggttattaaaagcgttgaacggactaccacggaggaatggcgtaaagttctgtccgttaatctggatggtgtttttttcggcacccgtctgggcattcagcgcatgaaaaataaaggcttgggcgctagcatcatcaatatgagcagtattatggggctcgtaggcgatccgactctgggggcatacaacgcttccaagggggcggtacgtatcatgtcgaaaagcgcagcgctggattgcgcactgaaggacatggatgtgcgtgtcaacacagtacatccgggcgcgatcaagaccgaacggaaggatcagctggaaggttgggaggaaatgatgtcacagcgtacgctgacccctatgggccacattggcgaaccgaatgacatcgcatggatctgtgtgtacctggcgtctgacgaatcgaaatttgcgacgggtgcagaatttgtggtcgacggcgggtggaccgcacag

SEQ ID NO: 252 - protein, 252 aa, Artificial Sequence
  Engineered Variant of Kred from Lactobacillus kefir
MTDRLKHKVAIVTGGTMGIGLAIADKFVEEGAKVVITGRHADVGEKAAKSIGGTDVIRFVQHDASEEAGWTKLFDTTEEAFGPVTTLVNNAGIGVIKSVERTTTEEWRKVLSVNLDGVFFGTRLGIQRMKNKGLGASIINMSSIMGLVGDPTLGAYNASKGAVRIMSKSAALDCALKDMDVRVNTVHPGAIKTERKDQLEGWEEMMSQRTLTPMGHIGEPNDIAWICVYLASDESKFATGAEFVVDGGWTAQ

SEQ ID NO: 253 - DNA, 756 bp, Artificial Sequence
  Engineered Variant of Kred from Lactobacillus kefir
atgaccgatcgtctgaagcataaagtagccatcgttaccggcgggacaatgggtatcggtttggcaatcgccgataaatttgtagaggagggtgcgaaagtagttattactggtcgtcacgcggatgtaggtgaaaaagccgccaaatcaatcggcggcactgatgttattcgctttgtccagcacgatgcgtccgaagaagcaggctggacgaaactgttcgacaccaccgaggaggcattcggcccggttacgaccctggtgaacaatgcagggattggggttattaaaagcgttgaacggactaccacggaggaatggcgtaaagtgctgtccgttaatctggatggtgtttttttcggcacccgtctgggcattcagcgcatgaaaaataaaggcttgggcgctagcatcatcaatatgagcagtattatggggctcgtaggcgatccgactctgggggcatacaacgcttccaagggggcggtacgtatcatgtcgaaaagcgcagcgctggattgcgcactgaaggactacgatgtgcgtgtcaacacagtacatccgggcgcgatcaagaccccacggaaggatcagctggaaggttgggaggaaatgatgtcacagcgtacgctgacccctatgggccacattggcgaaccgaatgacatcgcatggatctgtgtgtacctggcatctgacgaatcgaaatttgcgacgggtgcagaatttgtggtcgacggcgggtggaccgcacag

SEQ ID NO: 254 - protein, 252 aa, Artificial Sequence
  Engineered Variant of Kred from Lactobacillus kefir
MTDRLKHKVAIVTGGTMGIGLAIADKFVEEGAKVVITGRHADVGEKAAKSIGGTDVIRFVQHDASEEAGWTKLFDTTEEAFGPVTTLVNNAGIGVIKSVERTTTEEWRKVLSVNLDGVFFGTRLGIQRMKNKGLGASIINMSSIMGLVGDPTLGAYNASKGAVRIMSKSAALDCALKDYDVRVNTVHPGAIKTPRKDQLEGWEEMMSQRTLTPMGHIGEPNDIAWICVYLASDESKFATGAEFVVDGGWTAQ

SEQ ID NO: 255 - DNA, 756 bp, Artificial Sequence
  Engineered Variant of Kred from Lactobacillus kefir
atgaccgatcgtctgaagcataaagtagccatcgttaccggcgggacaatgggtatcggtttggcaatcgccgataaatttgtagaggagggtgcgaaagtagttattactggtcgtcacgcggatgtaggtgaaaaagccgccaaatcaatcggcggcactgatgttattcgctttgtccagcacgatgcgtccgaagaagcaggctggacgaagctgttcgacaccaccgaggaggcattcggcccggttacgaccctggtgaacaatgcagggattggggttattaaaagcgttgaacgtactcgcacggaggaatggcgtaaaatcctgtccgttaatctggatggtgtttttttcggcacccgtctgggcattcagcgcatgaaaaataaaggcttgggcgctagcatcatcaatatgagcagtattatggggattgtaggcgatccgactctgggggcatacaacgcttccaagggggcggtacgtatcatgtcgaaaagcgcagcgctggattgcgcactgaaggactacgatgtgcgtgtcaacacagtacatccgggcgcgatcaagaccccacggaaggatcagctggaaggttgggaggaaatgatgtcacagcgtacgctgacccctatgggccacattggcgaaccgaatgacatcgcatggatctgtgtgtacctggcatctgacgaatcgaaatttgcgacgggtgcagaatttgtggtcgacggcgggtggaccgcacag

SEQ ID NO: 256 - protein, 252 aa, Artificial Sequence
  Engineered Variant of Kred from Lactobacillus kefir
MTDRLKHKVAIVTGGTMGIGLAIADKFVEEGAKVVITGRHADVGEKAAKSIGGTDVIRFVQHDASEEAGWTKLFDTTEEAFGPVTTLVNNAGIGVIKSVERTRTEEWRKILSVNLDGVFFGTRLGIQRMKNKGLGASIINMSSIMGIVGDPTLGAYNASKGAVRIMSKSAALDCALKDYDVRVNTVHPGAIKTPRKDQLEGWEEMMSQRTLTPMGHIGEPNDIAWICVYLASDESKFATGAEFVVDGGWTAQ

SEQ ID NO: 257 - DNA, 756 bp, Artificial Sequence; identical to SEQ ID NO: 253
  Engineered Variant of Kred from Lactobacillus kefir

SEQ ID NO: 258 - protein, 252 aa, Artificial Sequence; identical to SEQ ID NO: 254
  Engineered Variant of Kred from Lactobacillus kefir

SEQ ID NO: 259 - DNA, 756 bp, Artificial Sequence
  Engineered Variant of Kred from Lactobacillus kefir
atgaccgatcgtctgaagcagaaagtagccatcgttaccggcgggacaatgggtatcggtttggcaatcgccgataaatttgtagaggagggtgcgaaagtagttattactggtcgtcacgcggatgtaggtgaaaaagccgccaaatcaatcggcggcactgatgttattcgctttgtccagcacgatgcgtccgaagaagcaggctggacgaagctgttcgacaccaccgaggaggcattcggcccggttacgaccctggtgaacaatgcagggattggggttattaaaagcgttgaacggactaccacggaggaatggcgtaaaatcctgtccgttaatctggatggtgtttttttcggcacccgtctgggcattcagcgcatgaaaaataaaggcttgggcgctagcatcatcaatatgagcagtattatggggattgtaggcgatccgactctgggggcatacaacgcttccaagggggcggtacgtatcatgtcgaaaagcgcagcgctggattgcgcactgaaggactacgatgtgcgtgtcaacacagtacatccgggcgcgatcaagaccccacggaaggatcagctggaaggttgggaggaaatgatgtcacagcgtacgctgacccctatgggccacattggcgaaccgaatgacatcgcatggatctgtgtgtacctggcatctgacgaatcgaaatttgcgacgggtgcagaatttgtggtcgacggcgggtggaccgcacag

SEQ ID NO: 260 - protein, 252 aa, Artificial Sequence
  Engineered Variant of Kred from Lactobacillus kefir
MTDRLKQKVAIVTGGTMGIGLAIADKFVEEGAKVVITGRHADVGEKAAKSIGGTDVIRFVQHDASEEAGWTKLFDTTEEAFGPVTTLVNNAGIGVIKSVERTTTEEWRKILSVNLDGVFFGTRLGIQRMKNKGLGASIINMSSIMGIVGDPTLGAYNASKGAVRIMSKSAALDCALKDYDVRVNTVHPGAIKTPRKDQLEGWEEMMSQRTLTPMGHIGEPNDIAWICVYLASDESKFATGAEFVVDGGWTAQ

SEQ ID NO: 261 - DNA, 756 bp, Artificial Sequence
  Engineered Variant of Kred from Lactobacillus kefir
atgaccgatcgtctgaagcataaagtagccatcgttaccggcgggacaatgggtatcggtttggcaatcgccgataaatttgtagaggagggtgcgaaagtagttattactggtcgtcacgcggatgtaggtgaaaaagccgccaaatcaatcggcggcactgatgttattcgctttgtccagcacgatgcgtccgaagaagcaggctggacgaaactgttcgacaccaccgaggaggcattcggcccggttacgaccctggtgaacaatgcagggattggggttattaaaagcgttgaacggactaccacggaggaatggcgtaaaatcctgtccgttaatctggatggtgtttttttcggcacccgtctgggcattcagcgcatgaaaaataaaggcttgggcgctagcatcatcaatatgagcagtattatggggctcgtaggcgatccgactctgggggcatacaacgcttccaagggggcggtacgtatcatgtcgaaaagcgcagcgctggattgcgcactgaaggactacgatgtgcgtgtcaacacagtacatccgggcgcgatcaagaccccacggaaggatcagctggaaggttgggaggaaatgatgtcacagcgtacgctgacccctatgggccacattggcgaaccgaatgacatcgcatggatctgtgtgtacctggcatctgacgaatcgaaatttgcgacgggtgcagaatttgtggtcgacggcgggtacaccgcacag

SEQ ID NO: 262 - protein, 252 aa, Artificial Sequence
  Engineered Variant of Kred from Lactobacillus kefir
MTDRLKHKVAIVTGGTMGIGLAIADKFVEEGAKVVITGRHADVGEKAAKSIGGTDVIRFVQHDASEEAGWTKLFDTTEEAFGPVTTLVNNAGIGVIKSVERTTTEEWRKILSVNLDGVFFGTRLGIQRMKNKGLGASIINMSSIMGLVGDPTLGAYNASKGAVRIMSKSAALDCALKDYDVRVNTVHPGAIKTPRKDQLEGWEEMMSQRTLTPMGHIGEPNDIAWICVYLASDESKFATGAEFVVDGGYTAQ

SEQ ID NO: 263 - DNA, 756 bp, Artificial Sequence
  Engineered Variant of Kred from Lactobacillus kefir
atgaccgatcgtctgaagcataaagtagccatcgttaccggcgggacaatgggtatcggtttggcaatcgccgataaatttgtagaggagggtgcgaaagtagttattactggtcgtcacgcggatgtaggtgaaaaagccgccaaatcaatcggcggcactgatgttattcgctttgtccagcacgatgcgtccgaagaagcaggctggacgaaactgttcgacaccaccgaggaggcattcggcccggttacgaccctggtgaacaatgcagggattggggttattaaaagcgttgaacggactaccacggaggaatggcgtaaaatcctgtccgttaatctggatggtgtttttttcggcacccgtctgggcattcagcgcatgaaaaataaaggcttgggcgctagcatcatcaatatgagcagtattatggggattgtaggcgatccgactctgggggcatacaacgcttccaagggggcggtacgtatcatgtcgaaaagcgcagcgctggattgcgcactgaaggactacgatgtgcgtgtcaacacagtacatccgggcgcgatcaagaccccacggaaggatcagctggaaggttgggaggaaatgatgtcacagcgtacgctgacccctatgggccacattggcgaaccgaatgacatcgcatggatctgtgtgtacctggcatctgacgaatcgaaatttgcgacgggtgcagaatttgtggtcgacggcgggtggaccgcacag

SEQ ID NO: 264 - protein, 252 aa, Artificial Sequence
  Engineered Variant of Kred from Lactobacillus kefir
MTDRLKHKVAIVTGGTMGIGLAIADKFVEEGAKVVITGRHADVGEKAAKSIGGTDVIRFVQHDASEEAGWTKLFDTTEEAFGPVTTLVNNAGIGVIKSVERTTTEEWRKILSVNLDGVFFGTRLGIQRMKNKGLGASIINMSSIMGIVGDPTLGAYNASKGAVRIMSKSAALDCALKDYDVRVNTVHPGAIKTPRKDQLEGWEEMMSQRTLTPMGHIGEPNDIAWICVYLASDESKFATGAEFVVDGGWTAQ

SEQ ID NO: 265 - DNA, 756 bp, Artificial Sequence
  Engineered Variant of Kred from Lactobacillus kefir
atgaccgatcgtctgaagcacaaagtagccatcatcaccggcgggacaatgggtatcggtttggcaatcgccgataaatttgtagaggagggtgcgaaagtagttattactggtcgtcacgcggatgtaggtgaaaaagccgccaaatcaatcggcggcactgatgttattcgctttgtccagcacgatgcgagcgaagaagcaggctggacgagtctgttcgacaccaccgaggaggcattcggcccggttacgaccctggtgaacaatgcagggattggggtaattaagagcgttgaacggactaccacggaggaatggcgtaaagttctgtccgttaatctggatggtgtttttttcggcacccgtctgggcattcagcgcatgaaaaataaaggcttgggcgctagcatcatcaatatgagcagtattatggggattgtaggcgctccgatggcaggggcatacaacgcttccaagggggcggtacgtatcatgtcgaaaagcgcagcgctggattgcgcactgaaggactacgatgtgcgtgtcaacacagtacatccgggcgcgatcaagaccccacggaaggatcagctggaaggttgggagcaggcaatgtcacagcgtacggcgacccctatgggccacattggcgaaccgaatgacatcgcatggatctgtgtgtacctggcatctgacgaatcgaaatttgcgacgggtgcagaatttgtggtcgacggcgggtggaccgcacag

SEQ ID NO: 266 - protein, 252 aa, Artificial Sequence
  Engineered Variant of Kred from Lactobacillus kefir
MTDRLKHKVAIITGGTMGIGLAIADKFVEEGAKVVITGRHADVGEKAAKSIGGTDVIRFVQHDASEEAGWTSLFDTTEEAFGPVTTLVNNAGIGVIKSVERTTTEEWRKVLSVNLDGVFFGTRLGIQRMKNKGLGASIINMSSIMGIVGAPMAGAYNASKGAVRIMSKSAALDCALKDYDVRVNTVHPGAIKTPRKDQLEGWEQAMSQRTATPMGHIGEPNDIAWICVYLASDESKFATGAEFVVDGGWTAQ

SEQ ID NO: 267 - DNA, 756 bp, Artificial Sequence
  Engineered Variant of Kred from Lactobacillus kefir
atgaccgaccgtctgaagcacaaagtagccatcatcaccggcgggacaatgggtatcggtttggcaatcgccgataaatttgtagaggagggtgcgaaagtagttattactggtcgtcacgcggatgtaggtgaaaaagccgccaaatcaatcggcggcactgatgttattcgctttgtccagcacgatgcgagcgaagaagcaggctggacgagtctgttcgacaccaccgaggaggcattcggcccggttacgaccctggtgaacaatgcagggattggggtaattaagagcgttgaatatactcagacggaggaatggcgtaaagttctgtccgttaatctggatggtgtttttttcggcacccgtctgggcattcagcgcatgaaaaataaaggcttgggcgctagcatcatcaatatgagcagtattatggggctggtaggcgctccgatggcaggggcatacaacgcttccaagggggcggtacgtatcatgtcgaaaagcgcagcgctggattgcgcactgaaggactacgatgtgcgtgtcaacacagtacatccgggcgcgatcaagaccccacggaaggatcagctggaaggttgggaggaagcaatgtcacagcgtacggcgacccctatgggccacattggcgaaccgaatgacatcgcatggatctgtgtgtacctggcatctgacgaatcgaaatttgcgacgggtgcagaatttgtggtcgacggcgggtacaccgcacag

SEQ ID NO: 268 - protein, 252 aa, Artificial Sequence
  Engineered Variant of Kred from Lactobacillus kefir
MTDRLKHKVAIITGGTMGIGLAIADKFVEEGAKVVITGRHADVGEKAAKSIGGTDVIRFVQHDASEEAGWTSLFDTTEEAFGPVTTLVNNAGIGVIKSVEYTQTEEWRKVLSVNLDGVFFGTRLGIQRMKNKGLGASIINMSSIMGLVGAPMAGAYNASKGAVRIMSKSAALDCALKDYDVRVNTVHPGAIKTPRKDQLEGWEEAMSQRTATPMGHIGEPNDIAWICVYLASDESKFATGAEFVVDGGYTAQ

SEQ ID NO: 269 - DNA, 756 bp, Artificial Sequence
  Engineered Variant of Kred from Lactobacillus kefir
atgaccgatcgtctgaagcacaaagtagccatcgtcaccggcgggacaatgggtatcggtttggcaatcgccgataaatttgtagaggagggtgcgaaagtagttattactggtcgtcacgcggatgtaggtctgaaagccgccaaatcaatcggtggcagtgatgttattcgctttgtccagcacgatgcgtccgaagaagcaggctggacgagtctgttcgacaccaccgaggaggcattcggcccggttacgaccctggtgaacaatgcagggattggggtaattaagagcgttgaacggactaccacggaggaatggcgtaaagttctgtccgttaatctggatggtgtttttttcggcacccgtctgggcattcagcgcatgaaaaataaaggcttgggcgctagcatcatcaatatgagcagtattatggggctggtaggcgctccgatggcaggggcatacaacgcttccaagggggcggtacgtatcatgtcgaaaagcgcagcgctggattgcgcactgaaggactacgatgtgcgtgtcaacacagtacatccgggcgcgatcaagaccgagcggaaggatcagctggaaggttgggagcaggcaatgtcacagcgtacggcgacccctatgggccacattggcgaaccgaatgacatcgcatggatctgtgtgtacctggcatctgacgaatcgaaatttgcgacgggtgcagaatttgtggtcgacggcgggtggaccgcacag

SEQ ID NO: 270 - protein, 252 aa, Artificial Sequence
  Engineered Variant of Kred from Lactobacillus kefir
MTDRLKHKVAIVTGGTMGIGLAIADKFVEEGAKVVITGRHADVGLKAAKSIGGSDVIRFVQHDASEEAGWTSLFDTTEEAFGPVTTLVNNAGIGVIKSVERTTTEEWRKVLSVNLDGVFFGTRLGIQRMKNKGLGASIINMSSIMGLVGAPMAGAYNASKGAVRIMSKSAALDCALKDYDVRVNTVHPGAIKTERKDQLEGWEQAMSQRTATPMGHIGEPNDIAWICVYLASDESKFATGAEFVVDGGWTAQ

SEQ ID NO: 271 - DNA, 756 bp, Artificial Sequence
  Engineered Variant of Kred from Lactobacillus kefir
atgaccgaccgtctgaagcacaaagtagccatcattaccggcgggacaatgggtatcggtttggcaatcgccgataaatttgtagaggagggtgcgaaagtagttattactggtcgtcacgcggatgtaggtgaaaaagccgccaaatcaatcggtggcagtgatgttattcgctttgtccagcacgatgcgtcggaagaagcaggctggacgacgctgttcgacaccaccgaggaggcattcggcccggttacgaccctggtgaacaatgcagggattggggttattaaaagcgttgaacggactaccacggaggaatggcgtaaagttctgtccgttaatctggatggtgtttttttcggcacccgtctgggcattcagcgcatgaaaaataaaggcttgggcgctagcatcatcaatatgagcagtattatggggctcgtaggcgatccgatgctgggggcatacaacgcttccaagggggcggtacgtatcatgtcgaaaagcgcagcgctggattgcgcactgaaggactacgatgtgcgtgtcaacacagtacatccgggcgcgatcaagaccgaacggaaggatcagctggaaggttgggaggagatgatgtcacagcgtacgctgacccctatgggccacattggcgaaccgaatgacatcgcatggatctgtgtgtacctggcgtctgacgaatcgaaatttgcgacgggtgcagaatttgtggtcgacggcgggtacaccgcacag

SEQ ID NO: 272 - protein, 252 aa, Artificial Sequence
  Engineered Variant of Kred from Lactobacillus kefir
MTDRLKHKVAIITGGTMGIGLAIADKFVEEGAKVVITGRHADVGEKAAKSIGGSDVIRFVQHDASEEAGWTTLFDTTEEAFGPVTTLVNNAGIGVIKSVERTTTEEWRKVLSVNLDGVFFGTRLGIQRMKNKGLGASIINMSSIMGLVGDPMLGAYNASKGAVRIMSKSAALDCALKDYDVRVNTVHPGAIKTERKDQLEGWEEMMSQRTLTPMGHIGEPNDIAWICVYLASDESKFATGAEFVVDGGYTAQ

SEQ ID NO: 273 - DNA, 756 bp, Artificial Sequence
  Engineered Variant of Kred from Lactobacillus kefir
atgaccgaccgtctgaagcacaaagtagccatcgttaccggcgggacaatgggtatcggtttggcaatcgccgataaatttgtagaggagggtgcgaaagtagttattactggtcgtcacgcggatgtaggtgaaaaagccgccaaatcaatcggcggcactgatgttattcgctttgtccagcacgatgcgtccgaagaagcaggctggacgaaactgttcgacaccaccgaggaggcattcggcccggttacgaccctggtgaacaatgcagggattggggttattaaaagcgttgaacggactaccacggaggaatggcgtaaagttctgtccgttaatctggatggtgtttttttcggcacccgtctgggcattcagcgcatgaaaaataaaggcttgggcgctagcatcatcaatatgagcagtattatggggctcgtaggcgatccgacgctgggggcatacaacgcttccaagggggcggtacgtatcatgtcgaaaagcgcagcgctggattgcgcactgaaggacatggatgtgcgtgtcaacacagtacatccgggcgcgatcaagaccgaacggaaggatcagctggaaggttgggaggaaatgatgtcacagcgtacgctgacccctatgggccacattggcgaaccgaatgacatcgcatggatctgtgtgtacctggcgtctgacgaatcgaaatttgcgacgggtgcagaatttgtggtcgacggcgggtacaccgcacag

SEQ ID NO: 274 - protein, 252 aa, Artificial Sequence
  Engineered Variant of Kred from Lactobacillus kefir
MTDRLKHKVAIVTGGTMGIGLAIADKFVEEGAKVVITGRHADVGEKAAKSIGGTDVIRFVQHDASEEAGWTKLFDTTEEAFGPVTTLVNNAGIGVIKSVERTTTEEWRKVLSVNLDGVFFGTRLGIQRMKNKGLGASIINMSSIMGLVGDPTLGAYNASKGAVRIMSKSAALDCALKDMDVRVNTVHPGAIKTERKDQLEGWEEMMSQRTLTPMGHIGEPNDIAWICVYLASDESKFATGAEFVVDGGYTAQ

SEQ ID NO: 275 - DNA, 756 bp, Artificial Sequence
  Engineered Variant of Kred from Lactobacillus kefir
atgaccgaccgtctgaagcagaaagtagccatcattaccggcgggacaatgggtatcggtttggcaatcgccgataaatttgtagaggagggtgcgaaagtagttattactggtcgtcacgcggatgtaggtgaaaaagccgccaaatcaatcggtggcagtgatgttattcgctttgtccagcacgatgcgtccgaagaagcaggctggacgaaactgttcgacaccaccgaggaggcattcggcccggttacgaccctggtgaacaatgcagggattggggttattaaaagcgttgaacggactaccacggaggaatggcgtaaagttctgtccgttaatctggatggtgtttttttcggcacccgtctgggcattcagcgcatgaaaaataaaggcttgggcgctagcatcatcaatatgagcagtattatggggctggtaggcgatccgacgctgggggcatacaacgcttccaagggggcggtacgtatcatgtcgaaaagcgcagcgctggattgcgcactgaaggactacgatgtgcgtgtcaacacagtacatccgggcgcgatcaagaccgaacggaaggatcagctggaaggttgggaggaaatgatgtcacagcgtacgctgacccctatgggccacattggcgaaccgaatgacatcgcatggatctgtgtgtacctggcgtctgacgaatcgaaatttgcgacgggtgcagaatttgtggtcgacggcgggtacaccgcacag

SEQ ID NO: 276 - protein, 252 aa, Artificial Sequence
  Engineered Variant of Kred from Lactobacillus kefir
MTDRLKQKVAIITGGTMGIGLAIADKFVEEGAKVVITGRHADVGEKAAKSIGGSDVIRFVQHDASEEAGWTKLFDTTEEAFGPVTTLVNNAGIGVIKSVERTTTEEWRKVLSVNLDGVFFGTRLGIQRMKNKGLGASIINMSSIMGLVGDPTLGAYNASKGAVRIMSKSAALDCALKDYDVRVNTVHPGAIKTERKDQLEGWEEMMSQRTLTPMGHIGEPNDIAWICVYLASDESKFATGAEFVVDGGYTAQ

SEQ ID NO: 277 - DNA, 756 bp, Artificial Sequence
  Engineered Variant of Kred from Lactobacillus kefir
atgaccgatcgtctgaagcacaaagtagccatcgttaccggcgggacaatgggtatcggtttggcaatcgccgataaatttgtagaggagggtgcgaaagtagttattactggtcgtcacgcggatgtaggtgaaaaagccgccaaatcaatcggtggcactgatgttattcgctttgtccagcacgatgcgtcggaagaagcaggctggacgtcgctgttcgacaccaccgaggaggcattcggcccggttacgaccctggtgaacaatgcagggattggggttattaaaagcgttgaacggactaccacggaggaatggcgtaaagttctgtccgttaatctggatggtgtttttttcggcacccgtctgggcattcagcgcatgaaaaataaaggcttgggcgctagcatcatcaatatgagcagtattatggggatggtaggcgatccgatgctgggggcatacaacgcttccaagggggcggtacgtatcatgtcgaaaagcgcagcgctggattgcgcactgaaggactacgatgtgcgtgtcaacacagtacatccgggcgcgatcaagaccgaacggaaggatcagctggaaggttgggaggagatgatgtcacagcgtacgctgacccctatgggccacattggcgaaccgaatgacatcgcatggatctgtgtgtacctggcgtctgacgaatcgaaatttgcgacgggtgcagaatttgtggtcgacggcgggtacaccgcacag

SEQ ID NO: 278 - protein, 252 aa, Artificial Sequence
  Engineered Variant of Kred from Lactobacillus kefir
MTDRLKHKVAIVTGGTMGIGLAIADKFVEEGAKVVITGRHADVGEKAAKSIGGTDVIRFVQHDASEEAGWTSLFDTTEEAFGPVTTLVNNAGIGVIKSVERTTTEEWRKVLSVNLDGVFFGTRLGIQRMKNKGLGASIINMSSIMGMVGDPMLGAYNASKGAVRIMSKSAALDCALKDYDVRVNTVHPGAIKTERKDQLEGWEEMMSQRTLTPMGHIGEPNDIAWICVYLASDESKFATGAEFVVDGGYTAQ

SEQ ID NO: 279 - DNA, 756 bp, Artificial Sequence
  Engineered Variant of Kred from Lactobacillus kefir
atgaccgatcgtctgaagcataaagtagccatcgttaccggcgggacaatgggtatcggtttggcaatcgccgataaatttgtagaggagggtgcgaaagtagttattactggtcgtgaggcggatgtaggtgaaaaagccgccaaatcaatcggcggcactgatgttattcgctttgtccagcacgatgcgtccgaagaagcaggctggacgaaactgttcgacaccaccgaggaggcattcggcccggttacgaccctggtgaacaatgcagggattggggttattaaaagcgttgaacggactaccacggaggaatggcgtaaagttctgtccgttaatctggatggtgtttttttcggcacccgtctgggcattcagcgcatgaaaaataaaggcttgggcgctagcatcatcaatatgagcagtattatggggctcgtaggcgatccgactctgggggcatacaacgcttccaagggggcggtacgtatcatgtcgaaaagcgcagcgctggattgcgcactgaaggacatggatgtgcgtgtcaacacagtacatccgggcgcgatcaagaccgaacggaaggatcagctggaaggttgggaggaaatgatgtcacagcgtacgctgacccctatgggccacattggcgaaccgaatgacatcgcatggatctgtgtgtacctggcgtctgacgaatcgaaatttgcgacgggtgcagaatttgtggtcgacggcgggtggaccgcacag

SEQ ID NO: 280 - protein, 252 aa, Artificial Sequence
  Engineered Variant of Kred from Lactobacillus kefir
MTDRLKHKVAIVTGGTMGIGLAIADKFVEEGAKVVITGREADVGEKAAKSIGGTDVIRFVQHDASEEAGWTKLFDTTEEAFGPVTTLVNNAGIGVIKSVERTTTEEWRKVLSVNLDGVFFGTRLGIQRMKNKGLGASIINMSSIMGLVGDPTLGAYNASKGAVRIMSKSAALDCALKDMDVRVNTVHPGAIKTERKDQLEGWEEMMSQRTLTPMGHIGEPNDIAWICVYLASDESKFATGAEFVVDGGWTAQ

SEQ ID NO: 281 - DNA, 756 bp, Artificial Sequence
  Engineered Variant of Kred from Lactobacillus kefir
atgaccgaccgtctgaagcacaaagtagccatcgttaccggcgggacaatgggtatcggtttggcaatcgccgataaatttgtagaggagggtgcgaaagtagttattactggtcgtcacgcggatgtaggtgaaaaagccgccaaatcaatcggtggcagtgatgttattcgctttgtccagcacgatgcgtcggaagaagcaggctggacgtcgctgttcgacaccaccgaggaggcattcggcccggttacgaccctggtgaacaatgcagggattggggttattaaaagcgttgaacggactacgacggaggaatggcgtaaagttctgtccgttaatctggatggtgtttttttcggcacccgtctgggcattcagcgcatgaaaaataaaggcttgggcgctagcatcatcaatatgagcagtattatggggctggtaggcgatccgactctgggggcatacaacgcttccaagggggcggtacgtatcatgtcgaaaagcgcagcgctggattgcgcactgaaggacatggatgtgcgtgtcaacacagtacatccgggcgcgatcaagaccgaacggaaggatcagctggaaggttgggaggagatgatgtcacagcgtacgctgacccctatgggccacattggcgaaccgaatgacatcgcatggatctgtgtgtacctggcgtctgacgaatcgaaatttgcgacgggtgcagaatttgtggtcgacggcgggtggaccgcacag

SEQ ID NO: 282 - protein, 252 aa, Artificial Sequence
  Engineered Variant of Kred from Lactobacillus kefir
MTDRLKHKVAIVTGGTMGIGLAIADKFVEEGAKVVITGRHADVGEKAAKSIGGSDVIRFVQHDASEEAGWTSLFDTTEEAFGPVTTLVNNAGIGVIKSVERTTTEEWRKVLSVNLDGVFFGTRLGIQRMKNKGLGASIINMSSIMGLVGDPTLGAYNASKGAVRIMSKSAALDCALKDMDVRVNTVHPGAIKTERKDQLEGWEEMMSQRTLTPMGHIGEPNDIAWICVYLASDESKFATGAEFVVDGGWTAQ

SEQ ID NO: 283 - DNA, 756 bp, Artificial Sequence
  Engineered Variant of Kred from Lactobacillus kefir
atgaccgaccgtctgaagcagaaagtagccatcgttaccggcgggacaatgggtatcggtttggcaatcgccgataaatttgtagaggagggtgcgaaagtagttattactggtcgtcacgcggatgtaggtgaaaaagccgccaaatcaatcggcggcactgatgttattcgctttgtccagcacgatgcgtccgaagaagcaggctggacgaaactgttcgacaccaccgaggaggcattcggcccggttacgaccctggtgaacaatgcagggattggggttattaaaagcgttgaacggactaccacggaggaatggcgtaaagttctgtccgttaatctggatggtgtttttttcggcacccgtctgggcattcagcgcatgaaaaataaaggcttgggcgctagcatcatcaatatgagcagtattatggggctggtaggcgatccgatgctgggggcatacaacgcttccaagggggcggtacgtatcatgtcgaaaagcgcagcgctggattgcgcactgaaggacatggatgtgcgtgtcaacacagtacatccgggcgcgatcaagaccgaacggaaggatcagctggaaggttgggaggaaatgatgtcacagcgtacgctgacccctatgggccacattggcgaaccgaatgacatcgcatggatctgtgtgtacctggcgtctgacgaatcgaaatttgcgacgggtgcagaatttgtggtcgacggcgggtggaccgcacag

SEQ ID NO: 284 - protein, 252 aa, Artificial Sequence
  Engineered Variant of Kred from Lactobacillus kefir
MTDRLKQKVAIVTGGTMGIGLAIADKFVEEGAKVVITGRHADVGEKAAKSIGGTDVIRFVQHDASEEAGWTKLFDTTEEAFGPVTTLVNNAGIGVIKSVERTTTEEWRKVLSVNLDGVFFGTRLGIQRMKNKGLGASIINMSSIMGLVGDPMLGAYNASKGAVRIMSKSAALDCALKDMDVRVNTVHPGAIKTERKDQLEGWEEMMSQRTLTPMGHIGEPNDIAWICVYLASDESKFATGAEFVVDGGWTAQ

SEQ ID NO: 285 - DNA, 756 bp, Artificial Sequence
  Engineered Variant of Kred from Lactobacillus kefir
atgaccgatcgtctgaagcacaaagtagccatcgtcaccggcgggacaatgggtatcggtttggcaatcgccgataaatttgtagaggagggtgcgaaagtagttattactggtcgtcacgcggatgtaggtctgaaagccgccaaatcaatcggtggcagtgatgttattcgctttgtccagcacgatgcgtccgaagaagcaggctggacgagtctgttcgacaccaccgaggaggcattcggcccggttacgaccctggtgaacaatgcagggattggggtaattaagagcgttgaacggactaccacggaggaatggcgtaaagttctgtccgttaatctggatggtgtttttttcggcacccgtctgggcattcagcgcatgaaaaataaaggcttgggcgctagcatcatcaatatgagcagtattatggggctggtaggctatccggcggccggggcatacaacgcttccaagggggcggtacgtatcatgtcgaaaagcgcagcgctggattgcgcactgaaggactacgatgtgcgtgtcaacacagtacatccgggcgcgatcaagaccgagcggaaggatcagctggaaggttgggagcaggcaatgtcacagcgtacggcgacccctatgggccacattggcgaaccgaatgacatcgcatggatctgtgtgtacctggcatctgacgaatcgaaatttgcgacgggtgcagaatttgtggtcgacggcgggtggaccgcacag

SEQ ID NO: 286 - protein, 252 aa, Artificial Sequence
  Engineered Variant of Kred from Lactobacillus kefir
MTDRLKHKVAIVTGGTMGIGLAIADKFVEEGAKVVITGRHADVGLKAAKSIGGSDVIRFVQHDASEEAGWTSLFDTTEEAFGPVTTLVNNAGIGVIKSVERTTTEEWRKVLSVNLDGVFFGTRLGIQRMKNKGLGASIINMSSIMGLVGYPAAGAYNASKGAVRIMSKSAALDCALKDYDVRVNTVHPGAIKTERKDQLEGWEQAMSQRTATPMGHIGEPNDIAWICVYLASDESKFATGAEFVVDGGWTAQ

SEQ ID NO: 287 - DNA, 756 bp, Artificial Sequence
  Engineered Variant of Kred from Lactobacillus kefir
atgaccgatcgtctgaagcacaaagtagccatcgtcaccggcgggacaatgggtatcggtttggcaatcgccgataaatttgtagaggagggtgcgaaagtagttattactggtcgtcacgcggatgtaggtctgaaagccgccaaatcaatcggtggcagtgatgttattcgctttgtccagcacgatgcgtccgaagaagcaggctggacgagtctgttcgacaccaccgaggaggcattcggcccggttacgaccctggtgaacaatgcagggattggggtaattaaaagcgttgaacggactaccacggaggaatggcgtaaagttctgtccgttaatctggatggtgtttttttcggcacccgtctgggcattcagcgcatgaaaaataaaggcttgggcgctagcatcatcaatatgagcagtattatggggctggtaggctatccgtcggccggggcatacaacgcttccaagggggcggtacgtatcatgtcgaaaagcgcagcgctggattgcgcactgaaggactacgatgtgcgtgtcaacacagtacatccgggcgcgatcaagaccgagcggaaggatcagctggaaggttgggagcaggcaatgtcacagcgtacggcgacccctatgggccacattggcgaaccgaatgacatcgcatggatctgtgtgtacctggcatctgacgaatcgaaatttgcgacgggtgcagaatttgtggtcgacggcgggtggaccgcacag

SEQ ID NO: 288 - protein, 252 aa, Artificial Sequence
  Engineered Variant of Kred from Lactobacillus kefir
MTDRLKHKVAIVTGGTMGIGLAIADKFVEEGAKVVITGRHADVGLKAAKSIGGSDVIRFVQHDASEEAGWTSLFDTTEEAFGPVTTLVNNAGIGVIKSVERTTTEEWRKVLSVNLDGVFFGTRLGIQRMKNKGLGASIINMSSIMGLVGYPSAGAYNASKGAVRIMSKSAALDCALKDYDVRVNTVHPGAIKTERKDQLEGWEQAMSQRTATPMGHIGEPNDIAWICVYLASDESKFATGAEFVVDGGWTAQ

SEQ ID NO: 289 - DNA, 756 bp, Artificial Sequence
  Engineered Variant of Kred from Lactobacillus kefir
atgaccgatcgtctgaagcacaaagtagccatcgtcaccggcgggacaatgggtatcggtttggcaatcgccgataaatttgtagaggagggtgcgaaagtagttattactggtcgtcacgcggatgtaggtctgaaagccgccaaatcaatcggtggcagtgatgttattcgctttgtccagcacgatgcgtccgaagaagcaggctggacgagtctgttcgacaccaccgaggaggcattcggcccggttacgaccctggtgaacaatgcagggattggggtaattaagagcgttgaacggactaccacggaggaatggcgtaaagttctgtccgttaatctggatggtgtttttttcggcacccgtctgggcattcagcgcatgaaaaataaaggcttgggcgctagcatcatcaatatgagcagtattatggggctggtaggcgctccgatggcaggggcatacaacgcttccaagggggcggtacgtatcatgtcgaaaagcgcagcgctggattgcgcactgaaggactacgatgtgcgtgtcaacacagtacatccgggcgcgatcaagacctcggctaaagatcagctggaaggttgggagcaggcaatgtcacagcgtacggcgacccctatgggccacattggcgaaccgaatgacatcgcatggatctgtgtgtacctggcatctgacgaatcgaaatttgcgacgggtgcagaatttgtggtcgacggcgggtggaccgcacag

SEQ ID NO: 290 - protein, 252 aa, Artificial Sequence
  Engineered Variant of Kred from Lactobacillus kefir
MTDRLKHKVAIVTGGTMGIGLAIADKFVEEGAKVVITGRHADVGLKAAKSIGGSDVIRFVQHDASEEAGWTSLFDTTEEAFGPVTTLVNNAGIGVIKSVERTTTEEWRKVLSVNLDGVFFGTRLGIQRMKNKGLGASIINMSSIMGLVGAPMAGAYNASKGAVRIMSKSAALDCALKDYDVRVNTVHPGAIKTSAKDQLEGWEQAMSQRTATPMGHIGEPNDIAWICVYLASDESKFATGAEFVVDGGWTAQ

SEQ ID NO: 291 - DNA, 756 bp, Artificial Sequence
  Engineered Variant of Kred from Lactobacillus kefir
atgaccgatcgtctgaagcacaaagtagccatcgtcaccggcgggacaatgggtatcggtttggcaatcgccgataaatttgtagaggagggtgcgaaagtagttattactggtcgtcacgcggatgtaggtctgaaagccgccaaatcaatcggtggcagtgatgttattcgctttgtccagcacgatgcgtccgaagaagcaggctggacgagtctgttcgacaccaccgaggaggcattcggcccggttacgaccctggtgaacaatgcagccgagggcgtcattaagagcgttgaacggactaccacggaggaatggcgtaaagttctgtccgttaatctggatggtgtttttttcggcacccgtctgggcattcagcgcatgaaaaataaaggcttgggcgctagcatcatcaatatgagcagtattatggggctggtaggcgctccgatggcaggggcatacaacgcttccaagggggcggtacgtatcatgtcgaaaagcgcagcgctggattgcgcactgaaggactacgatgtgcgtgtcaacacagtacatccgggcgcgatcaagaccgagcggaaggatcagctggaaggttgggagcaggcaatgtcacagcgtacggcgacccctatgggccacattggcgaaccgaatgacatcgcatggatctgtgtgtacctggcatctgacgaatcgaaatttgcgacgggtgcagaatttgtggtcgacggcgggtggaccgcacag

SEQ ID NO: 292 - protein, 252 aa, Artificial Sequence
  Engineered Variant of Kred from Lactobacillus kefir
MTDRLKHKVAIVTGGTMGIGLAIADKFVEEGAKVVITGRHADVGLKAAKSIGGSDVIRFVQHDASEEAGWTSLFDTTEEAFGPVTTLVNNAAEGVIKSVERTTTEEWRKVLSVNLDGVFFGTRLGIQRMKNKGLGASIINMSSIMGLVGAPMAGAYNASKGAVRIMSKSAALDCALKDYDVRVNTVHPGAIKTERKDQLEGWEQAMSQRTATPMGHIGEPNDIAWICVYLASDESKFATGAEFVVDGGWTAQ

SEQ ID NO: 293 - DNA, 756 bp, Artificial Sequence
  Engineered Variant of Kred from Lactobacillus kefir
atgaccgatcgtctgaagcacaaagtagccatcgtcaccggcgggacaatgggtatcggtttggcaatcgccgataaatttgtagaggagggtgcgaaagtagttattactggtcgtcacgcggatgtaggtctgaaagccgccaaatcaatcggtggcagtgatgttattcgctttgtccagcacgatgcgtccgaagaagcaggctggacgagtctgttcgacaccaccgaggaggcattcggcccggttacgaccctggtgaacaatgcagggattggggtaattaaaagcgttgaacggactaccacggaggaatggcgtaaagttctgtccgttaatctggatggtgtttttttcggcacccgtctgggcattcagcgcatgaaaaataaaggcttgggcgctagcatcatcaatatgagcagtattatggggctggtaggcgatccggcgctgggggcatacaacgcttccaagggggcggtacgtatcatgtcgaaaagcgcagcgctggattgcgcactgaaggactacgatgtgcgtgtcaacacagtacatccgggcgcgatcaagaccgagcggaaggatcagctggaaggttgggagcaggcaatgtcacagcgtacggcgacccctatgggccacattggcgaaccgaatgacatcgcatggatctgtgtgtacctggcatctgacgaatcgaaatttgcgacgggtgcagaatttgtggtcgacggcgggtggaccgcacag

SEQ ID NO: 294 - protein, 252 aa, Artificial Sequence
  Engineered Variant of Kred from Lactobacillus kefir
MTDRLKHKVAIVTGGTMGIGLAIADKFVEEGAKVVITGRHADVGLKAAKSIGGSDVIRFVQHDASEEAGWTSLFDTTEEAFGPVTTLVNNAGIGVIKSVERTTTEEWRKVLSVNLDGVFFGTRLGIQRMKNKGLGASIINMSSIMGLVGDPALGAYNASKGAVRIMSKSAALDCALKDYDVRVNTVHPGAIKTERKDQLEGWEQAMSQRTATPMGHIGEPNDIAWICVYLASDESKFATGAEFVVDGGWTAQ

SEQ ID NO: 295 - DNA, 756 bp, Artificial Sequence
  Engineered Variant of Kred from Lactobacillus kefir
atgaccgaccgtctgaagcacaaagtagccatcattaccggcgggacaatgggtatcggtttggcaatcgccgataaatttgtagaggagggtgcgaaagtagttattactggtcgtcacgcggatgtaggtgaaaaagccgccaaatcaatcggtggcagtgatgttattcgctttgtccagcacgatgcgtcggaagaagcaggctggacgacgctgttcgacaccaccgaggaggcattcggcccggttacgaccctggtgaacaatgcaggtgatggccgtattaaaagcgttgaacggactaccacggaggaatggcgtaaagttctgtccgttaatctggatggtgtttttttcggcacccgtctgggcattcagcgcatgaaaaataaaggcttgggcgctagcatcatcaatatgagcagtattatggggctcgtaggcgatccgatgctgggggcatacaacgcttccaagggggcggtacgtatcatgtcgaaaagcgcagcgctggattgcgcactgaaggactacgatgtgcgtgtcaacacagtacatccgggcgcgatcaagaccgaacggaaggatcagctggaaggttgggaggagatgatgtcacagcgtacgctgacccctatgggccacattggcgaaccgaatgacatcgcatggatctgtgtgtacctggcgtctgacgaatcgaaatttgcgacgggtgcagaatttgtggtcgacggcgggtacaccgcacag

SEQ ID NO: 296 - protein, 252 aa, Artificial Sequence
  Engineered Variant of Kred from Lactobacillus kefir
MTDRLKHKVAIITGGTMGIGLAIADKFVEEGAKVVITGRHADVGEKAAKSIGGSDVIRFVQHDASEEAGWTTLFDTTEEAFGPVTTLVNNAGDGRIKSVERTTTEEWRKVLSVNLDGVFFGTRLGIQRMKNKGLGASIINMSSIMGLVGDPMLGAYNASKGAVRIMSKSAALDCALKDYDVRVNTVHPGAIKTERKDQLEGWEEMMSQRTLTPMGHIGEPNDIAWICVYLASDESKFATGAEFVVDGGYTAQ

SEQ ID NO: 297 - DNA, 756 bp, Artificial Sequence
  Engineered Variant of Kred from Lactobacillus kefir
atgaccgaccgtctgaagcacaaagtagccatcattaccggcgggacaatgggtatcggtttggcaatcgccgataaatttgtagaggagggtgcgaaagtagttattactggtcgtcacgcggatgtaggtgaaaaagccgccaaatcaatcggtggcagtgatgttattcgctttgtccagcacgatgcgtcggaagaagcaggctggacgacgctgttcgacaccaccgaggaggcattcggcccggttacgaccctggtgaacaatgcaggtgctggcaaaattaaaagcgttgaacggactaccacggaggaatggcgtcgtgttctgtccgtgaatctggatggtgtttttttcggcacccgtctgggcattcagcgcatgaaaaataaaggcttgggcgctagcatcatcaatatgagcagtattatggggctcgtaggcgatccgatgctgggggcatacaacgcttccaagggggcggtacgtatcatgtcgaaaagcgcagcgctggattgcgcactgaaggactacgatgtgcgtgtcaacacagtacatccgggcgcgatcaagaccgaacggaaggatcagctggaaggttgggaggagatgatgtcacagcgtacgctgacccctatgggccacattggcgaaccgaatgacatcgcatggatctgtgtgtacctggcgtctgacgaatcgaaatttgcgacgggtgcagaatttgtggtcgacggcgggtacaccgcacag

SEQ ID NO: 298 - protein, 252 aa, Artificial Sequence
  Engineered Variant of Kred from Lactobacillus kefir
MTDRLKHKVAIITGGTMGIGLAIADKFVEEGAKVVITGRHADVGEKAAKSIGGSDVIRFVQHDASEEAGWTTLFDTTEEAFGPVTTLVNNAGAGKIKSVERTTTEEWRRVLSVNLDGVFFGTRLGIQRMKNKGLGASIINMSSIMGLVGDPMLGAYNASKGAVRIMSKSAALDCALKDYDVRVNTVHPGAIKTERKDQLEGWEEMMSQRTLTPMGHIGEPNDIAWICVYLASDESKFATGAEFVVDGGYTAQ

SEQ ID NO: 299 - DNA, 756 bp, Artificial Sequence
  Engineered Variant of Kred from Lactobacillus kefir
atgaccgaccgtctgaagcacaaagtagccatcattaccggcgggacaatgggtatcggtttggcaatcgccgataaatttgtagaggagggtgcgaaagtagttattactggtcgtcacgcggatgtaggtgaaaaagccgccaaatcaatcggtggcagtgatgttattcgctttgtccagcacgatgcgtcggaagaagcaggctggacgacgctgttcgacaccaccgaggaggcattcggcccggttacgaccctggtgaacaatgcaggtgctggccgtattaaaagcgttgaacggactaccacggaggaatggcgtgatgttctgtccgtgacgctggatggtgtttttttcggcacccgtctgggcattcagcgcatgaaaaataaaggcttgggcgctagcatcatcaatatgagcagtattatggggctcgtaggcgatccgatgctgggggcatacaacgcttccaagggggcggtacgtatcatgtcgaaaagcgcagcgctggattgcgcactgaaggactacgatgtgcgtgtcaacacagtacatccgggcgcgatcaagaccgaacggaaggatcagctggaaggttgggaggagatgatgtcacagcgtacgctgacccctatgggccacattggcgaaccgaatgacatcgcatggatctgtgtgtacctggcgtctgacgaatcgaaatttgcgacgggtgcagaatttgtggtcgacggcgggtacaccgcacag

SEQ ID NO: 300 - protein, 252 aa, Artificial Sequence
  Engineered Variant of Kred from Lactobacillus kefir
MTDRLKHKVAIITGGTMGIGLAIADKFVEEGAKVVITGRHADVGEKAAKSIGGSDVIRFVQHDASEEAGWTTLFDTTEEAFGPVTTLVNNAGAGRIKSVERTTTEEWRDVLSVTLDGVFFGTRLGIQRMKNKGLGASIINMSSIMGLVGDPMLGAYNASKGAVRIMSKSAALDCALKDYDVRVNTVHPGAIKTERKDQLEGWEEMMSQRTLTPMGHIGEPNDIAWICVYLASDESKFATGAEFVVDGGYTAQ

SEQ ID NO: 301 - DNA, 756 bp, Artificial Sequence
  Engineered Variant of Kred from Lactobacillus kefir
atgaccgaccgtctgaagcacaaagtagccatcattaccggcgggacaatgggtatcggtttggcaatcgccgataaatttgtagaggagggtgcgaaagtagttattactggtcgtcacgcggatgtaggtgaaaaagccgccaaatcaatcggtggcagtgatgttattcgctttgtccagcacgatgcgtcggaagaagcaggctggacgacgctgttcgacaccaccgaggaggcattcggcccggttacgaccctggtgaacaatgcaggtcgtggcgccattaaaagcgttgaacggactaccacggaggaatggcgtaaagttctgtccgtgacgctggatggtgtttttttcggcacccgtctgggcattcagcgcatgaaaaataaaggcttgggcgctagcatcatcaatatgagcagtattatggggctcgtaggcgatccgatgctgggggcatacaacgcttccaagggggcggtacgtatcatgtcgaaaagcgcagcgctggattgcgcactgaaggactacgatgtgcgtgtcaacacagtacatccgggcgcgatcaagaccgaacggaaggatcagctggaaggttgggaggagatgatgtcacagcgtacgctgacccctatgggccacattggcgaaccgaatgacatcgcatggatctgtgtgtacctggcgtctgacgaatcgaaatttgcgacgggtgcagaatttgtggtcgacggcgggtacaccgcacag

SEQ ID NO: 302 - protein, 252 aa, Artificial Sequence
  Engineered Variant of Kred from Lactobacillus kefir
MTDRLKHKVAIITGGTMGIGLAIADKFVEEGAKVVITGRHADVGEKAAKSIGGSDVIRFVQHDASEEAGWTTLFDTTEEAFGPVTTLVNNAGRGAIKSVERTTTEEWRKVLSVTLDGVFFGTRLGIQRMKNKGLGASIINMSSIMGLVGDPMLGAYNASKGAVRIMSKSAALDCALKDYDVRVNTVHPGAIKTERKDQLEGWEEMMSQRTLTPMGHIGEPNDIAWICVYLASDESKFATGAEFVVDGGYTAQ

SEQ ID NO: 303 - DNA, 756 bp, Artificial Sequence
  Engineered Variant of Kred from Lactobacillus kefir
atgaccgaccgtctgaagcacaaagtagccatcattaccggcgggacaatgggtatcggtttggcaatcgccgataaatttgtagaggagggtgcgaaagtagttattactggtcgtcacgcggatgtaggtgaaaaagccgccaaatcaatcggtggcagtgatgttattcgctttgtccagcacgatgcgtcggaagaagcaggctggacgacgctgttcgacaccaccgaggaggcattcggcccggttacgaccctggtgaacaatgcagggatgggggttattaaaagcgttgaacggactaccacggaggaatggcgtaaagttctgtccgttaatctggatggtgtttttttcggcacccgtctgggcattcagcgcatgaaaaataaaggcttgggcgctagcatcatcaatatgagcagtattatggggctcgtaggcgatccgatgctgggggcatacaacgcttccaagggggcggtacgtatcatgtcgaaaagcgcagcgctggattgcgcactgaaggactacgatgtgcgtgtcaacacagtacatccgggcgcgatcaagaccgaacggaaggatcagctggaaggttgggaggagatgatgtcacagcgtacgctgacccctatgggccacattggcgaaccgaatgacatcgcatggatctgtgtgtacctggcgtctgacgaatcgaaatttgcgacgggtgcagaatttgtggtcgacggcgggtacaccgcacag

SEQ ID NO: 304 - protein, 252 aa, Artificial Sequence
  Engineered Variant of Kred from Lactobacillus kefir
MTDRLKHKVAIITGGTMGIGLAIADKFVEEGAKVVITGRHADVGEKAAKSIGGSDVIRFVQHDASEEAGWTTLFDTTEEAFGPVTTLVNNAGMGVIKSVERTTTEEWRKVLSVNLDGVFFGTRLGIQRMKNKGLGASIINMSSIMGLVGDPMLGAYNASKGAVRIMSKSAALDCALKDYDVRVNTVHPGAIKTERKDQLEGWEEMMSQRTLTPMGHIGEPNDIAWICVYLASDESKFATGAEFVVDGGYTAQ

SEQ ID NO: 305 - DNA, 756 bp, Artificial Sequence
  Engineered Variant of Kred from Lactobacillus kefir
atgaccgaccgtctgaagcacaaagtagccatcattaccggcgggacaatgggtatcggtttggcaatcgccgataaatttgtagaggagggtgcgaaagtagttattactggtcgtcacgcggatgtaggtgaaaaagccgccaaatcaatcggtggcagtgatgttattcgctttgtccagcacgatgcgtcggaagaagcaggctggacgacgctgttcgacaccaccgaggaggcattcggcccggttacgaccctggtgaacaatgcaggtgagggcgtcattaaaagcgttgaacggactaccacggaggaatggcgtcgtgttctgtccgtggcgctggatggtgtttttttcggcacccgtctgggcattcagcgcatgaaaaataaaggcttgggcgctagcatcatcaatatgagcagtattatggggctcgtaggcgatccgatgctgggggcatacaacgcttccaagggggcggtacgtatcatgtcgaaaagcgcagcgctggattgcgcactgaaggactacgatgtgcgtgtcaacacagtacatccgggcgcgatcaagaccgaacggaaggatcagctggaaggttgggaggagatgatgtcacagcgtacgctgacccctatgggccacattggcgaaccgaatgacatcgcatggatctgtgtgtacctggcgtctgacgaatcgaaatttgcgacgggtgcagaatttgtggtcgacggcgggtacaccgcacag

SEQ ID NO: 306 - protein, 252 aa, Artificial Sequence
  Engineered Variant of Kred from Lactobacillus kefir
MTDRLKHKVAIITGGTMGIGLAIADKFVEEGAKVVITGRHADVGEKAAKSIGGSDVIRFVQHDASEEAGWTTLFDTTEEAFGPVTTLVNNAGEGVIKSVERTTTEEWRRVLSVALDGVFFGTRLGIQRMKNKGLGASIINMSSIMGLVGDPMLGAYNASKGAVRIMSKSAALDCALKDYDVRVNTVHPGAIKTERKDQLEGWEEMMSQRTLTPMGHIGEPNDIAWICVYLASDESKFATGAEFVVDGGYTAQ

SEQ ID NO: 307 - DNA, 756 bp, Artificial Sequence
  Engineered Variant of Kred from Lactobacillus kefir
atgaccgaccgtctgaagcacaaagtagccatcattaccggcgggacaatgggtatcggtttggcaatcgccgataaatttgtagaggagggtgcgaaagtagttattactggtcgtcacgcggatgtaggtgaaaaagccgccaaatcaatcggtggcagtgatgttattcgctttgtccagcacgatgcgtcggaagaagcaggctggacgacgctgttcgacaccaccgaggaggcattcggcccggttacgaccctggtgaacaatgcagggattggggttattaaaagcgttgaacggactaccacggaggaatggcgtaaagttctgtccgtggcgctggatggtgtttttttcggcacccgtctgggcattcagcgcatgaaaaataaaggcttgggcgctagcatcatcaatatgagcagtattatggggctcgtaggcgatccgatgctgggggcatacaacgcttccaagggggcggtacgtatcatgtcgaaaagcgcagcgctggattgcgcactgaaggactacgatgtgcgtgtcaacacagtacatccgggcgcgatcaagaccgaacggaaggatcagctggaaggttgggaggagatgatgtcacagcgtacgctgacccctatgggccacattggcgaaccgaatgacatcgcatggatctgtgtgtacctggcgtctgacgaatcgaaatttgcgacgggtgcagaatttgtggtcgacggcgggtacaccgcacag

SEQ ID NO: 308 - protein, 252 aa, Artificial Sequence
  Engineered Variant of Kred from Lactobacillus kefir
MTDRLKHKVAIITGGTMGIGLAIADKFVEEGAKVVITGRHADVGEKAAKSIGGSDVIRFVQHDASEEAGWTTLFDTTEEAFGPVTTLVNNAGIGVIKSVERTTTEEWRKVLSVALDGVFFGTRLGIQRMKNKGLGASIINMSSIMGLVGDPMLGAYNASKGAVRIMSKSAALDCALKDYDVRVNTVHPGAIKTERKDQLEGWEEMMSQRTLTPMGHIGEPNDIAWICVYLASDESKFATGAEFVVDGGYTAQ

SEQ ID NO: 309 - DNA, 756 bp, Artificial Sequence
  Engineered Variant of Kred from Lactobacillus kefir
atgaccgaccgtctgaagcacaaagtagccatcattaccggcgggacaatgggtatcggtttggcaatcgccgataaatttgtagaggagggtgcgaaagtagttattactggtcgtcacgcggatgtaggtgaaaaagccgccaaatcaatcggtggcagtgatgttattcgctttgtccagcacgatgcgtcggaagaagcaggctggacgacgctgttcgacaccaccgaggaggcattcggcccggttacgaccctggtgaacaatgcagctgatggccgtattaaaagcgttgaacggactaccacggaggaatggcgtaaagttctgtccgttaatctggatggtgtttttttcggcacccgtctgggcattcagcgcatgaaaaataaaggcttgggcgctagcatcatcaatatgagcagtattatggggctcgtaggcgatccgatgctgggggcatacaacgcttccaagggggcggtacgtatcatgtcgaaaagcgcagcgctggattgcgcactgaaggactacgatgtgcgtgtcaacacagtacatccgggcgcgatcaagaccgaacggaaggatcagctggaaggttgggaggagatgatgtcacagcgtacgctgacccctatgggccacattggcgaaccgaatgacatcgcatggatctgtgtgtacctggcgtctgacgaatcgaaatttgcgacgggtgcagaatttgtggtcgacggcgggtacaccgcacag

SEQ ID NO: 310 - protein, 252 aa, Artificial Sequence
  Engineered Variant of Kred from Lactobacillus kefir
MTDRLKHKVAIITGGTMGIGLAIADKFVEEGAKVVITGRHADVGEKAAKSIGGSDVIRFVQHDASEEAGWTTLFDTTEEAFGPVTTLVNNAADGRIKSVERTTTEEWRKVLSVNLDGVFFGTRLGIQRMKNKGLGASIINMSSIMGLVGDPMLGAYNASKGAVRIMSKSAALDCALKDYDVRVNTVHPGAIKTERKDQLEGWEEMMSQRTLTPMGHIGEPNDIAWICVYLASDESKFATGAEFVVDGGYTAQ

SEQ ID NO: 311 - DNA, 756 bp, Artificial Sequence
  Engineered Variant of Kred from Lactobacillus kefir
atgaccgatcgtctgaagcacaaagtagccatcgtcaccggcgggacaatgggtatcggtttggcaatcgccgataaatttgtagaggagggtgcgaaagtagttattactggtcgtcacgcggatgtaggtctgaaagccgccaaatcaatcggtggcagtgatgttattcgctttgtccagcacgatgcgtccgaagaagcaggctggacgagtctgttcgacaccaccgaggaggcattcggcccggttacgaccctggtgaacaatgcagggattggggtggccaagagcgttgaacggactaccacggaggaatggcgtaaagttctgtccgttaatctggatggtgtttttttcggcacccgtctgggcattcagcgcatgaaaaataaaggcttgggcgctagcatcatcaatatgagcagtattatggggctggtaggctatccggcggccggggcatacaacgcttccaagggggcggtacgtatcatgtcgaaaagcgcagcgctggattgcgcactgaaggactacgatgtgcgtgtcaacacagtacatccgggcgcgatcaagaccgagcggaaggatcagctggaaggttgggagcaggcaatgtcacagcgtacggcgacccctatgggccacattggcgaaccgaatgacatcgcatggatctgtgtgtacctggcatctgacgaatcgaaatttgcgacgggtgcagaatttgtggtcgacggcgggtggaccgcacag

SEQ ID NO: 312 - protein, 252 aa, Artificial Sequence
  Engineered Variant of Kred from Lactobacillus kefir
MTDRLKHKVAIVTGGTMGIGLAIADKFVEEGAKVVITGRHADVGLKAAKSIGGSDVIRFVQHDASEEAGWTSLFDTTEEAFGPVTTLVNNAGIGVAKSVERTTTEEWRKVLSVNLDGVFFGTRLGIQRMKNKGLGASIINMSSIMGLVGYPAAGAYNASKGAVRIMSKSAALDCALKDYDVRVNTVHPGAIKTERKDQLEGWEQAMSQRTATPMGHIGEPNDIAWICVYLASDESKFATGAEFVVDGGWTAQ

SEQ ID NO: 313 - DNA, 756 bp, Artificial Sequence
  Engineered Variant of Kred from Lactobacillus kefir
atgaccgatcgtctgaagcacaaagtagccatcgtcaccggcgggacaatgggtatcggtttggcaatcgccgataaatttgtagaggagggtgcgaaagtagttattactggtcgtcacgcggatgtaggtctgaaagccgccaaatcaatcggtggcagtgatgttattcgctttgtccagcacgatgcgtccgaagaagcaggctggacgagtctgttcgacaccaccgaggaggcattcggcccggttacgaccctggtgaacaatgcagggattggggtgatcaagagcgttgaacggactaccacggaggaatggcgtaaagttctgtccgttaatctggatggtgtttttttcggcacccgtctgggcattcagcgcatgaaaaataaaggcttgggcgctagcatcatcaatatgagctcgatcgcagggctggtaggcgccccggccgccggggcatacaacgcttccaagggggcggtacgtatcatgtcgaaaagcgcagcgctggattgcgcactgaaggactacgatgtgcgtgtcaacacagtacatccgggcgcgatcaagaccgagcggaaggatcagctggaaggttgggagcaggcaatgtcacagcgtacggcgacccctatgggccacattggcgaaccgaatgacatcgcatggatctgtgtgtacctggcatctgacgaatcgaaatttgcgacgggtgcagaatttgtggtcgacggcgggtggaccgcacag

SEQ ID NO: 314 - protein, 252 aa, Artificial Sequence
  Engineered Variant of Kred from Lactobacillus kefir
MTDRLKHKVAIVTGGTMGIGLAIADKFVEEGAKVVITGRHADVGLKAAKSIGGSDVIRFVQHDASEEAGWTSLFDTTEEAFGPVTTLVNNAGIGVIKSVERTTTEEWRKVLSVNLDGVFFGTRLGIQRMKNKGLGASIINMSSIAGLVGAPAAGAYNASKGAVRIMSKSAALDCALKDYDVRVNTVHPGAIKTERKDQLEGWEQAMSQRTATPMGHIGEPNDIAWICVYLASDESKFATGAEFVVDGGWTAQ

SEQ ID NO: 315 - DNA, 756 bp, Artificial Sequence
  Engineered Variant of Kred from Lactobacillus kefir
atgaccgatcgtctgaagcacaaagtagccatcatcaccggcgggacaatgggtatcggtttggcaatcgccgataaatttgtagaggagggtgcgaaagtagttattactggtcgtcacgcggatgtaggtgagaaagccgccaaatcaatcggtggcagtgatgttattcgctttgtccagcacgatgcgtccgaagaagcaggctggacgagcctgttcgacaccaccgaggaggcattcggcccggttacgaccctggtgaacaatgcagggattggggtaattaagagcgttgaacggactaccacggaggaatggcgtaaagttctgtccgttaatctggatggtgtttttttcggcacccgtctgggcattcagcgcatgaaaaataaaggcttgggcgctagcatcatcaatatgagcagtattatggggctggtaggctatccggccgccggggcatacaacgcttccaagggggcggtacgtatcatgtcgaaaagcgcagcgctggattgcgcactgaaggactacgatgtgcgtgtcaacacagtacatccgggcgcgatcaagaccgagcggaaggatcagctggaaggttgggagcaggcaatgtcacagcgtacggcgacccctatgggccacattggcgaaccgaatgacatcgcatggatctgtgtgtacctggcatctgacgaatcgaaatttgcgacgggtgcagaatttgtggtcgacggcgggtacaccgcacag

SEQ ID NO: 316 - protein, 252 aa, Artificial Sequence
  Engineered Variant of Kred from Lactobacillus kefir
MTDRLKHKVAIITGGTMGIGLAIADKFVEEGAKVVITGRHADVGEKAAKSIGGSDVIRFVQHDASEEAGWTSLFDTTEEAFGPVTTLVNNAGIGVIKSVERTTTEEWRKVLSVNLDGVFFGTRLGIQRMKNKGLGASIINMSSIMGLVGYPAAGAYNASKGAVRIMSKSAALDCALKDYDVRVNTVHPGAIKTERKDQLEGWEQAMSQRTATPMGHIGEPNDIAWICVYLASDESKFATGAEFVVDGGYTAQ

SEQ ID NO: 317 - DNA, 756 bp, Artificial Sequence
  Engineered Variant of Kred from Lactobacillus kefir
atgaccgatcgtctgaagcacaaagtagccatcgtcaccggcgggacaatgggtatcggtttggcaatcgccgataaatttgtagaggagggtgcgaaagtagttattactggtcgtcacgcggatgtaggtgagaaagccgccaaatcaatcggtggcagtgatgttattcgctttgtccagcacgatgcgtccgaagaagcaggctggacgagtctgttcgacaccaccgaggaggcattcggcccggttacgaccctggtgaacaatgcagggattggggtaattaagagcgttgaacggactaccacggaggaatggcgtaaagttctgtccgttaatctggatggtgtttttttcggcacccgtctgggcattcagcgcatgaaaaataaaggcttgggcgctagcatcatcaatatgagcagtattatggggctggtaggctatccggccgccggggcatacaacgcttccaagggggcggtacgtatcatgtcgaaaagcgcagcgctggattgcgcactgaaggactacgatgtgcgtgtcaacacagtacatccgggcgcgatcaagaccgagcggaaggatcagctggaaggttgggagcaggcaatgtcacagcgtacggcgacccctatgggccacattggcgaaccgaatgacatcgcatggatctgtgtgtacctggcatctgacgaatcgaaatttgcgacgggtgcagaatttgtggtcgacggcgggtacaccgcacag

SEQ ID NO: 318 - protein, 252 aa, Artificial Sequence
  Engineered Variant of Kred from Lactobacillus kefir
MTDRLKHKVAIVTGGTMGIGLAIADKFVEEGAKVVITGRHADVGEKAAKSIGGSDVIRFVQHDASEEAGWTSLFDTTEEAFGPVTTLVNNAGIGVIKSVERTTTEEWRKVLSVNLDGVFFGTRLGIQRMKNKGLGASIINMSSIMGLVGYPAAGAYNASKGAVRIMSKSAALDCALKDYDVRVNTVHPGAIKTERKDQLEGWEQAMSQRTATPMGHIGEPNDIAWICVYLASDESKFATGAEFVVDGGYTAQ

SEQ ID NO: 319 - DNA, 756 bp, Artificial Sequence
  Engineered Variant of Kred from Lactobacillus kefir
atgaccgatcgtctgaagcacaaagtagccatcgtcaccggcgggacaatgggtatcggtttggcaatcgccgataaatttgtagaggagggtgcgaaagtagttattactggtcgtcacgcggatgtaggtgagaaagccgccaaatcaatcggtggcagtgatgttattcgctttgtccagcacgatgcgtccgaagaagcaggctggacgagtctgttcgacaccaccgaggaggcattcggcccggttacgaccctggtgaacaatgcagggattggggtaattaagagcgttgaacggactaccacggaggaatggcgtgatgttctgtccgttaatctggatggtgtttttttcggcacccgtctgggcattcagcgcatgaaaaataaaggcttgggcgctagcatcatcaatatgagcagtattatggggctggtaggctatccggccgccggggcatacaacgcttccaagggggcggtacgtatcatgtcgaaaagcgcagcgctggattgcgcactgaaggactacgatgtgcgtgtcaacacagtacatccgggcgcgatcaagaccgagcggaaggatcagctggaaggttgggagcaagcaatgtcacagcgtacggcgacccctatgggccacattggcgaaccgaatgacatcgcatggatctgtgtgtacctggcatctgacgaatcgaaatttgcgacgggtgcagaatttgtggtcgacggcgggtacaccgcacag

SEQ ID NO: 320 - protein, 252 aa, Artificial Sequence
  Engineered Variant of Kred from Lactobacillus kefir
MTDRLKHKVAIVTGGTMGIGLAIADKFVEEGAKVVITGRHADVGEKAAKSIGGSDVIRFVQHDASEEAGWTSLFDTTEEAFGPVTTLVNNAGIGVIKSVERTTTEEWRDVLSVNLDGVFFGTRLGIQRMKNKGLGASIINMSSIMGLVGYPAAGAYNASKGAVRIMSKSAALDCALKDYDVRVNTVHPGAIKTERKDQLEGWEQAMSQRTATPMGHIGEPNDIAWICVYLASDESKFATGAEFVVDGGYTAQ

SEQ ID NO: 321 - DNA, 756 bp, Artificial Sequence
  Engineered Variant of Kred from Lactobacillus kefir
atgaccgatcgtctgaagcacaaagtagccatcgtcaccggcgggacaatgggtatcggtttggcaatcgccgataaatttgtagaggagggtgcgaaagtagttattactggtcgtcacgcggatgtaggtgagaaagccgccaaatcaatcggtggcagtgatgttattcgctttgtccagcacgatgcgtccgaagaagcaggctggacgaccctgttcgacaccaccgaggaggcattcggcccggttacgaccctggtgaacaatgcagggattggggtaattaagagcgttgaacggactaccacggaggaatggcgtaaagttctgtccgttaatctggatggtgtttttttcggcacccgtctgggcattcagcgcatgaaaaataaaggcttgggcgctagcatcatcaatatgagcagtattatggggctggtaggctatccggccgccggggcatacaacgcttccaagggggcggtacgtatcatgtcgaaaagcgcagcgctggattgcgcactgaaggactacgatgtgcgtgtcaacacagtacatccgggcgcgatcaagaccgagcggaaggatcagctggaaggttgggagcaggcaatgtcacagcgtacggcgacccctatgggccacattggcgaaccgaatgacatcgcatggatctgtgtgtacctggcatctgacgaatcgaaatttgcgacgggtgcagaatttgtggtcgacggcgggtacaccgcacag

SEQ ID NO: 322 - protein, 252 aa, Artificial Sequence
  Engineered Variant of Kred from Lactobacillus kefir
MTDRLKHKVAIVTGGTMGIGLAIADKFVEEGAKVVITGRHADVGEKAAKSIGGSDVIRFVQHDASEEAGWTTLFDTTEEAFGPVTTLVNNAGIGVIKSVERTTTEEWRKVLSVNLDGVFFGTRLGIQRMKNKGLGASIINMSSIMGLVGYPAAGAYNASKGAVRIMSKSAALDCALKDYDVRVNTVHPGAIKTERKDQLEGWEQAMSQRTATPMGHIGEPNDIAWICVYLASDESKFATGAEFVVDGGYTAQ

SEQ ID NO: 323 - DNA, 756 bp, Artificial Sequence
  Engineered Variant of Kred from Lactobacillus kefir
atgaccgatcgtctgaagcacaaagtagccatcatcaccggcgggacaatgggtatcggtttggcaatcgccgataaatttgtagaggagggtgcgaaagtagttattactggtcgtcacgcggatgtaggtgagaaagccgccaaatcaatcggtggcagtgatgttattcgctttgtccagcacgatgcgtccgaagaagcaggctggacgagcctgttcgacaccaccgaggaggcattcggcccggttacgaccctggtgaacaatgcaggggctggggtaattaagagcgttgaacggactaccacggaggaatggcgtaaagttctgtccgttaatctggatggtgtttttttcggcacccgtctgggcattcagcgcatgaaaaataaaggcttgggcgctagcatcatcaatatgagcagtattatggggctggtaggctatccggccgccggggcatacaacgcttccaagggggcggtacgtatcatgtcgaaaagcgcagcgctggattgcgcactgaaggactacgatgtgcgtgtcaacacagtacatccgggcgcgatcaagaccgagcggaaggatcagctggaaggttgggagcaggcaatgtcacagcgtacggcgacccctatgggccacattggcgaaccgaatgacatcgcatggatctgtgtgtacctggcatctgacgaatcgaaatttgcgacgggtgcagaatttgtggtcgacggcgggtacaccgcacag

SEQ ID NO: 324 - protein, 252 aa, Artificial Sequence
  Engineered Variant of Kred from Lactobacillus kefir
MTDRLKHKVAIITGGTMGIGLAIADKFVEEGAKVVITGRHADVGEKAAKSIGGSDVIRFVQHDASEEAGWTSLFDTTEEAFGPVTTLVNNAGAGVIKSVERTTTEEWRKVLSVNLDGVFFGTRLGIQRMKNKGLGASIINMSSIMGLVGYPAAGAYNASKGAVRIMSKSAALDCALKDYDVRVNTVHPGAIKTERKDQLEGWEQAMSQRTATPMGHIGEPNDIAWICVYLASDESKFATGAEFVVDGGYTAQ

SEQ ID NO: 325 - DNA, 756 bp, Artificial Sequence
  Engineered Variant of Kred from Lactobacillus kefir
atgaccgatcgtctgaagcacaaagtagccatcatcaccggcgggacaatgggtatcggtttggcaatcgccgataaatttgtagaggagggtgcgaaagtagttattactggtcgtcacgcggatgtaggtctgaaagccgccaaatcaatcggtggcagtgatgttattcgctttgtccagcacgatgcgtccgaagaagcaggctggacgagtctgttcgacaccaccgaggaggcattcggcccggttacgaccctggtgaacaatgcagggattggggtaattaagagcgttgaacggactaccacggaggaatggcgtgatgttctgtccgttaatctggatggtgtttttttcggcacccgtctgggcattcagcgcatgaaaaataaaggcttgggcgctagcatcatcaatatgagcagtattatggggctggtaggctatccggccgccggggcatacaacgcttccaagggggcggtacgtatcatgtcgaaaagcgcagcgctggattgcgcactgaaggactacgatgtgcgtgtcaacacagtacatccgggcgcgatcaagaccgagcggaaggatcagctggaaggttgggagcaggcaatgtcacagcgtacggcgacccctatgggccacattggcgaaccgaatgacatcgcatggatctgtgtgtacctggcatctgacgaatcgaaatttgcgacgggtgcagaatttgtggtcgacggcgggtacaccgcacag

SEQ ID NO: 326 - protein, 252 aa, Artificial Sequence
  Engineered Variant of Kred from Lactobacillus kefir
MTDRLKHKVAIITGGTMGIGLAIADKFVEEGAKVVITGRHADVGLKAAKSIGGSDVIRFVQHDASEEAGWTSLFDTTEEAFGPVTTLVNNAGIGVIKSVERTTTEEWRDVLSVNLDGVFFGTRLGIQRMKNKGLGASIINMSSIMGLVGYPAAGAYNASKGAVRIMSKSAALDCALKDYDVRVNTVHPGAIKTERKDQLEGWEQAMSQRTATPMGHIGEPNDIAWICVYLASDESKFATGAEFVVDGGYTAQ

SEQ ID NO: 327 - DNA, 756 bp, Artificial Sequence
  Engineered Variant of Kred from Lactobacillus kefir
atgaccgatcgtctgaagcacaaagtagccatcatcaccggcgggacaatgggtatcggtttggcaatcgccgataaatttgtagaggagggtgcgaaagtagttattactggtcgtcacgcggatgtaggtgagaaagccgccaaatcaatcggtggcagtgatgttattcgctttgtccagcacgatgcgtccgaagaagcaggctggacgaccctgttcgacaccaccgaggaggcattcggcccggttacgaccctggtgaacaatgcagggattggggtaattaagagcgttgaacggactaccacggaggaatggcgtgatgttctgtccgttaatctggatggtgtttttttcggcacccgtctgggcattcagcgcatgaaaaataaaggcttgggcgctagcatcatcaatatgagcagtattatggggctggtaggctatccggccgccggggcatacaacgcttccaagggggcggtacgtatcatgtcgaaaagcgcagcgctggattgcgcactgaaggactacgatgtgcgtgtcaacacagtacatccgggcgcgatcaagaccgagcggaaggatcagctggaaggttgggagcaggcaatgtcacagcgtacggcgacccctatgggccacattggcgaaccgaatgacatcgcatggatctgtgtgtacctggcatctgacgaatcgaaatttgcgacgggtgcagaatttgtggtcgacggcgggtacaccgcacag

SEQ ID NO: 328 - protein, 252 aa, Artificial Sequence
  Engineered Variant of Kred from Lactobacillus kefir
MTDRLKHKVAIITGGTMGIGLAIADKFVEEGAKVVITGRHADVGEKAAKSIGGSDVIRFVQHDASEEAGWTTLFDTTEEAFGPVTTLVNNAGIGVIKSVERTTTEEWRDVLSVNLDGVFFGTRLGIQRMKNKGLGASIINMSSIMGLVGYPAAGAYNASKGAVRIMSKSAALDCALKDYDVRVNTVHPGAIKTERKDQLEGWEQAMSQRTATPMGHIGEPNDIAWICVYLASDESKFATGAEFVVDGGYTAQ

SEQ ID NO: 329 - DNA, 756 bp, Artificial Sequence
  Engineered Variant of Kred from Lactobacillus kefir
atgaccgatcgtctgaagcacaaagtagccatcatcaccggcgggacaatgggtatcggtttggcaatcgccgataaatttgtagaggagggtgcgaaagtagttattactggtcgtcacgcggatgtaggtgagaaagccgccaaatcaatcggtggcagtgatgttattcgctttgtccagcacgatgcgtccgaagaagcaggctggacgaccctgttcgacaccaccgaggaggcattcggcccggttacgaccctggtgaacaatgcagggattggggtaattaagagcgttgaacggactaccacggaggaatggcgtgatgttctgtccgttaatctggatggtgtttttttcggcacccgtctgggcattcagcgcatgaaaaataaaggcttgggcgctagcatcatcaatatgagcagtattatggggctggtaggcgctccggccgccggggcatacaacgcttccaagggggcggtacgtatcatgtcgaaaagcgcagcgctggattgcgcactgaaggactacgatgtgcgtgtcaacacagtacatccgggcgcgatcaagaccgagtcgaaggatcagctggaaggttgggagcaggcaatgtcacagcgtacggcgacccctatgggccacattggcgaaccgaatgacatcgcatggatctgtgtgtacctggcatctgacgaatcgaaatttgcgacgggtgcagaatttgtggtcgacggcgggtacaccgcacag

SEQ ID NO: 330 - protein, 252 aa, Artificial Sequence
  Engineered Variant of Kred from Lactobacillus kefir
MTDRLKHKVAIITGGTMGIGLAIADKFVEEGAKVVITGRHADVGEKAAKSIGGSDVIRFVQHDASEEAGWTTLFDTTEEAFGPVTTLVNNAGIGVIKSVERTTTEEWRDVLSVNLDGVFFGTRLGIQRMKNKGLGASIINMSSIMGLVGAPAAGAYNASKGAVRIMSKSAALDCALKDYDVRVNTVHPGAIKTESKDQLEGWEQAMSQRTATPMGHIGEPNDIAWICVYLASDESKFATGAEFVVDGGYTAQ

SEQ ID NO: 331 - DNA, 756 bp, Artificial Sequence
  Engineered Variant of Kred from Lactobacillus kefir
atgaccgatcgtctgaagcacaaagtagccatcatcaccggcgggacaatgggtatcggtttggcaatcgccgataaatttgtagaggagggtgcgaaagtagttattactggtcgtcacgcggatgtaggtgagaaagccgccaaatcaatcggtggcagtgatgttattcgctttgtccagcacgatgcgtccgaagaagcaggctggacgaccctgttcgacaccaccgaggaggcattcggcccggttacgaccctggtgaacaatgcagggattggggtaattaagagcgttgaacggactaccacggaggaatggcgtgatgttctgtccgttaatctggatggtgtttttttcggcacccgtctgggcattcagcgcatgaaaaataaaggcttgggcgctagcatcatcaatatgagcagtattatggggctggtaggcgctccggccgccggggcatacaacgcttccaagggggcggtacgtatcatgtcgaaaagcgcagcgctggattgcgcactgaaggactacgatgtgcgtgtcaacacagtacatccgggcgcgatcaagaccgagcggaaggatcagctggaaggttgggagcaggcaatgtcacagcgtacggcgacccctatgggccacattggcgaaccgaatgacatcgcatggatctgtgtgtacctggcatctgacgaatcgaaatttgcgacgggtgcagaatttgtggtcgacggcgggtacaccgcacag

SEQ ID NO: 332 - protein, 252 aa, Artificial Sequence
  Engineered Variant of Kred from Lactobacillus kefir
MTDRLKHKVAIITGGTMGIGLAIADKFVEEGAKVVITGRHADVGEKAAKSIGGSDVIRFVQHDASEEAGWTTLFDTTEEAFGPVTTLVNNAGIGVIKSVERTTTEEWRDVLSVNLDGVFFGTRLGIQRMKNKGLGASIINMSSIMGLVGAPAAGAYNASKGAVRIMSKSAALDCALKDYDVRVNTVHPGAIKTERKDQLEGWEQAMSQRTATPMGHIGEPNDIAWICVYLASDESKFATGAEFVVDGGYTAQ

SEQ ID NO: 333 - DNA, 756 bp, Artificial Sequence
  Engineered Variant of Kred from Lactobacillus kefir
atgaccgatcgtctgaagcacaaagtagccatcatcaccggcgggacaatgggtatcggtttggcaatcgccgataaatttgtagaggagggtgcgaaagtagttattactggtcgtcacgcggatgtaggtgagaaagccgccaaatcaatcggtggcagtgatgttattcgctttgtccagcacgatgcgtccgaagaagcaggctggacgaccctgttcgacaccaccgaggaggcattcggcccggttacgaccctggtgaacaatgcagggattggggtaattaagagcgttgaacggactaccacggaggaatggcgtgatgttctgtccgttaatctggatggtgtttttttcggcacccgtctgggcattcagcgcatgaaaaataaaggcttgggcgctagcatcatcaatatgagcagtattatggggctggtaggctatccggccgccggggcatacaacgcttccaagggggcggtacgtatcatgtcgaaaagcgcagcgctggattgcgcactgaaggactacgatgtgcgtgtcaacacagtacatccgggcgcgatcaagaccgagtcgaaggatcagctggaaggttgggagcaggcaatgtcacagcgtacggcgacccctatgggccacattggcgaaccgaatgacatcgcatggatctgtgtgtacctggcatctgacgaatcgaaatttgcgacgggtgcagaatttgtggtcgacggcgggtacaccgcacag

SEQ ID NO: 334 - protein, 252 aa, Artificial Sequence
  Engineered Variant of Kred from Lactobacillus kefir
MTDRLKHKVAIITGGTMGIGLAIADKFVEEGAKVVITGRHADVGEKAAKSIGGSDVIRFVQHDASEEAGWTTLFDTTEEAFGPVTTLVNNAGIGVIKSVERTTTEEWRDVLSVNLDGVFFGTRLGIQRMKNKGLGASIINMSSIMGLVGYPAAGAYNASKGAVRIMSKSAALDCALKDYDVRVNTVHPGAIKTESKDQLEGWEQAMSQRTATPMGHIGEPNDIAWICVYLASDESKFATGAEFVVDGGYTAQ

SEQ ID NO: 335 - DNA, 756 bp, Artificial Sequence
  Engineered Variant of Kred from Lactobacillus kefir
atgaccgatcgtctgaagcacaaagtagccatcatcaccggcgggacaatgggtatcggtttggcaatcgccgataaatttgtagaggagggtgcgaaagtagttattactggtcgtcacgcggatgtaggtgagaaagccgccaaatcaatcggtggcagtgatgttattcgctttgtccagcacgatgcgtccgaagaagcaggctggacgaccctgttcgacaccaccgaggaggcattcggcccggttacgaccctggtgaacaatgcagggattggggtaattaagagcgttgaacggactaccacggaggaatggcgtgatgttctgtccgttaatctggatggtgtttttttcggcacccgtctgggcattcagcgcatgaaaaataaaggcttgggcgctagcatcatcaatatgagcagtattatggggctggtaggctatccggccgccggggcatacaacgcttccaagggggcggtacgtatcatgtcgaaaagcgcagcgctggattgcgcactgaaggactacgatgtgcgtgtcaacacagtacatccgggcgcgatcaagaccgaggcgaaggatcagctggaaggttgggagcaggcaatgtcacagcgtacggcgacccctatgggccacattggcgaaccgaatgacatcgcatggatctgtgtgtacctggcatctgacgaatcgaaatttgcgacgggtgcagaatttgtggtcgacggcgggtacaccgcacag

SEQ ID NO: 336 - protein, 252 aa, Artificial Sequence
  Engineered Variant of Kred from Lactobacillus kefir
MTDRLKHKVAIITGGTMGIGLAIADKFVEEGAKVVITGRHADVGEKAAKSIGGSDVIRFVQHDASEEAGWTTLFDTTEEAFGPVTTLVNNAGIGVIKSVERTTTEEWRDVLSVNLDGVFFGTRLGIQRMKNKGLGASIINMSSIMGLVGYPAAGAYNASKGAVRIMSKSAALDCALKDYDVRVNTVHPGAIKTEAKDQLEGWEQAMSQRTATPMGHIGEPNDIAWICVYLASDESKFATGAEFVVDGGYTAQ

SEQ ID NO: 337 - DNA, 756 bp, Artificial Sequence; identical to SEQ ID NO: 333
  Engineered Variant of Kred from Lactobacillus kefir

SEQ ID NO: 338 - protein, 252 aa, Artificial Sequence; identical to SEQ ID NO: 334
  Engineered Variant of Kred from Lactobacillus kefir

SEQ ID NO: 339 - DNA, 756 bp, Artificial Sequence
  Engineered Variant of Kred from Lactobacillus kefir
atgaccgatcgtctgaagcacaaagtagccatcatcaccggcgggacaatgggtatcggtttggcaatcgccgataaatttgtagaggagggtgcgaaagtagttattactggtcgtcacgcggatgtaggtgagaaagccgccaaatcaatcggtggcagtgatgttattcgctttgtccagcacgatgcgtccgaagaagcaggctggacgaccctgttcgacaccaccgaggaggcattcggcccggttacgaccctggtgaacaatgcagggattggggtaattaagagcgttgaacggactaccacggaggaatggcgtgatgttctgtccgttaatctggatggtgtttttttcggcacccgtctgggcattcagcgcatgaaaaataaaggcttgggcgctagcatcatcaatatgagcagtattatggggctggtaggcgctgccgccgccggggcatacaacgcttccaagggggcggtacgtatcatgtcgaaaagcgcagcgctggattgcgcactgaaggactacgatgtgcgtgtcaacacagtacatccgggcgcgatcaagaccgagcgcaaggatcagctggaaggttgggagcaggcaatgtcacagcgtacggcgacccctatgggccacattggcgaaccgaatgacatcgcatggatctgtgtgtacctggcatctgacgaatcgaaatttgcgacgggtgcagaatttgtggtcgacggcgggtacaccgcacag

SEQ ID NO: 340 - protein, 252 aa, Artificial Sequence
  Engineered Variant of Kred from Lactobacillus kefir
MTDRLKHKVAIITGGTMGIGLAIADKFVEEGAKVVITGRHADVGEKAAKSIGGSDVIRFVQHDASEEAGWTTLFDTTEEAFGPVTTLVNNAGIGVIKSVERTTTEEWRDVLSVNLDGVFFGTRLGIQRMKNKGLGASIINMSSIMGLVGAAAAGAYNASKGAVRIMSKSAALDCALKDYDVRVNTVHPGAIKTERKDQLEGWEQAMSQRTATPMGHIGEPNDIAWICVYLASDESKFATGAEFVVDGGYTAQ

SEQ ID NO: 341 - DNA, 756 bp, Artificial Sequence; identical to SEQ ID NO: 329
  Engineered Variant of Kred from Lactobacillus kefir

SEQ ID NO: 342 - protein, 252 aa, Artificial Sequence; identical to SEQ ID NO: 330
  Engineered Variant of Kred from Lactobacillus kefir

SEQ ID NO: 343 - DNA, 756 bp, Artificial Sequence
  Engineered Variant of Kred from Lactobacillus kefir
atgaccgatcgtctgaagcacaaagtagccatcatcaccggcgggacaatgggtatcggtttggcaatcgccgataaatttgtagaggagggtgcgaaagtagttattactggtcgtcacgcggatgtaggtgagaaagccgccaaatcaatcggtggcagtgatgttattcgctttgtccagcacgatgcgtccgaagaagcaggctggacgaccctgttcgacaccaccgaggaggcattcggcccggttacgaccctggtgaacaatgcagggatcgggcgtattaagagcgttgaacggactaccacggaggaatggcgtgatgttctgtccgttaatctggatggtgtttttttcggcacccgtctgggcattcagcgcatgaaaaataaaggcttgggcgctagcatcatcaatatgagcagtattatggggctggtaggcgctccggccgccggggcatacaacgcttccaagggggcggtacgtatcatgtcgaaaagcgcagcgctggattgcgcactgaaggactacgatgtgcgtgtcaacacagtacatccgggcgcgatcaagaccgagcgcaaggatcagctggaaggttgggagcaggcaatgtcacagcgtacggcgacccctatgggccacattggcgaaccgaatgacatcgcatggatctgtgtgtacctggcatctgacgaatcgaaatttgcgacgggtgcagaatttgtggtcgacggcgggtacaccgcacag

SEQ ID NO: 344 - protein, 252 aa, Artificial Sequence
  Engineered Variant of Kred from Lactobacillus kefir
MTDRLKHKVAIITGGTMGIGLAIADKFVEEGAKVVITGRHADVGEKAAKSIGGSDVIRFVQHDASEEAGWTTLFDTTEEAFGPVTTLVNNAGIGRIKSVERTTTEEWRDVLSVNLDGVFFGTRLGIQRMKNKGLGASIINMSSIMGLVGAPAAGAYNASKGAVRIMSKSAALDCALKDYDVRVNTVHPGAIKTERKDQLEGWEQAMSQRTATPMGHIGEPNDIAWICVYLASDESKFATGAEFVVDGGYTAQ

SEQ ID NO: 345 - DNA, 756 bp, Artificial Sequence
  Engineered Variant of Kred from Lactobacillus kefir
atgaccgatcgtctgaagcacaaagtagccatcatcaccggcgggacaatgggtatcggtttggcaatcgccgataaatttgtagaggagggtgcgaaagtagttattactggtcgtcacgcggatgtaggtgagaaagccgccaaatcaatcggtggcagtgatgttattcgctttgtccagcacgatgcgtccgaagaagcaggctggacgaccctgttcgacaccaccgaggaggcattcggcccggttacgaccctggtgaacaatgcaggggcaggggtcattaagagcgttgaacggactaccacggaggaatggcgtgatgttctgtccgttaatctggatggtgtttttttcggcacccgtctgggcattcagcgcatgaaaaataaaggcttgggcgctagcatcatcaatatgagcagtattatggggctggtaggcgctccggccgccggggcatacaacgcttccaagggggcggtacgtatcatgtcgaaaagcgcagcgctggattgcgcactgaaggactacgatgtgcgtgtcaacacagtacatccgggcgcgatcaagaccgagcgcaaggatcagctggaaggttgggagcaggcaatgtcacagcgtacggcgacccctatgggccacattggcgaaccgaatgacatcgcatggatctgtgtgtacctggcatctgacgaatcgaaatttgcgacgggtgcagaatttgtggtcgacggcgggtacaccgcacag

SEQ ID NO: 346 - protein, 252 aa, Artificial Sequence
  Engineered Variant of Kred from Lactobacillus kefir
MTDRLKHKVAIITGGTMGIGLAIADKFVEEGAKVVITGRHADVGEKAAKSIGGSDVIRFVQHDASEEAGWTTLFDTTEEAFGPVTTLVNNAGAGVIKSVERTTTEEWRDVLSVNLDGVFFGTRLGIQRMKNKGLGASIINMSSIMGLVGAPAAGAYNASKGAVRIMSKSAALDCALKDYDVRVNTVHPGAIKTERKDQLEGWEQAMSQRTATPMGHIGEPNDIAWICVYLASDESKFATGAEFVVDGGYTAQ

SEQ ID NO: 347 - DNA, 756 bp, Artificial Sequence
  Engineered Variant of Kred from Lactobacillus kefir
atgaccgatcgtctgaagcacaaagtagccatcatcaccggcgggacaatgggtatcggtttggcaatcgccgataaatttgtagaggagggtgcgaaagtagttattactggtcgtcacgcggatgtaggtgagaaagccgccaaatcaatcggtggcagtgatgttattcgctttgtccagcacgatgcgtccgaagaagcaggctggacgaccctgttcgacaccaccgaggaggcattcggcccggttacgaccctggtgaacaatgcaggggcagggcgtattaagagcgttgaacggactaccacggaggaatggcgtgatgttctgtccgttaatctggatggtgtttttttcggcacccgtctgggcattcagcgcatgaaaaataaaggcttgggcgctagcatcatcaatatgagcagtattgctgggctggtaggcgctccggccgccggggcatacaacgcttccaagggggcggtacgtatcatgtcgaaaagcgcagcgctggattgcgcactgaaggactacgatgtgcgtgtcaacacagtacatccgggcgcgatcaagaccgagcgcaaggatcagctggaaggttgggagcaggcaatgtcacagcgtacggcgacccctatgggccacattggcgaaccgaatgacatcgcatggatctgtgtgtacctggcatctgacgaatcgaaatttgcgacgggtgcagaatttgtggtcgacggcgggtacaccgcacag

SEQ ID NO: 348 - protein, 252 aa, Artificial Sequence
  Engineered Variant of Kred from Lactobacillus kefir
MTDRLKHKVAIITGGTMGIGLAIADKFVEEGAKVVITGRHADVGEKAAKSIGGSDVIRFVQHDASEEAGWTTLFDTTEEAFGPVTTLVNNAGAGRIKSVERTTTEEWRDVLSVNLDGVFFGTRLGIQRMKNKGLGASIINMSSIAGLVGAPAAGAYNASKGAVRIMSKSAALDCALKDYDVRVNTVHPGAIKTERKDQLEGWEQAMSQRTATPMGHIGEPNDIAWICVYLASDESKFATGAEFVVDGGYTAQ

SEQ ID NO: 349 - DNA, 756 bp, Artificial Sequence
  Engineered Variant of Kred from Lactobacillus kefir
atgaccgatcgtctgaagcacaaagtagccatcatcaccggcgggacaatgggtatcggtttggcaatcgccgataaatttgtagaggagggtgcgaaagtagttattactggtcgtcacgcggatgtaggtgagaaagccgccaaatcaatcggtggcagtgatgttattcgctttgtccagcacgatgcgtccgaagaagcaggctggacgaccctgttcgacaccaccgaggaggcattcggcccggttacgaccctggtgaacaatgcaggggcaggggtcattaagagcgttgaacggactaccacggaggaatggcgtaaagttctgtccgtcactctggatggtgtttttttcggcacccgtctgggcattcagcgcatgaaaaataaaggcttgggcgctagcatcatcaatatgagcagtattgctgggctggtaggcgctccggccgccggggcatacaacgcttccaagggggcggtacgtatcatgtcgaaaagcgcagcgctggattgcgcactgaaggactacgatgtgcgtgtcaacacagtacatccgggcgcgatcaagaccgagcgcaaggatcagctggaaggttgggagcaggcaatgtcacagcgtacggcgacccctatgggccacattggcgaaccgaatgacatcgcatggatctgtgtgtacctggcatctgacgaatcgaaatttgcgacgggtgcagaatttgtggtcgacggcgggtacaccgcacag

SEQ ID NO: 350 - protein, 252 aa, Artificial Sequence
  Engineered Variant of Kred from Lactobacillus kefir
MTDRLKHKVAIITGGTMGIGLAIADKFVEEGAKVVITGRHADVGEKAAKSIGGSDVIRFVQHDASEEAGWTTLFDTTEEAFGPVTTLVNNAGAGVIKSVERTTTEEWRKVLSVTLDGVFFGTRLGIQRMKNKGLGASIINMSSIAGLVGAPAAGAYNASKGAVRIMSKSAALDCALKDYDVRVNTVHPGAIKTERKDQLEGWEQAMSQRTATPMGHIGEPNDIAWICVYLASDESKFATGAEFVVDGGYTAQ

SEQ ID NO: 351 - DNA, 756 bp, Artificial Sequence
  Engineered Variant of Kred from Lactobacillus kefir
atgaccgatcgtctgaagcacaaagtagccatcatcaccggcgggacaatgggtatcggtttggcaatcgccgataaatttgtagaggagggtgcgaaagtagttattactggtcgtcacgcggatgtaggtgagaaagccgccaaatcaatcggtggcagtgatgttattcgctttgtccagcacgatgcgtccgaagaagcaggctggacgaccctgttcgacaccaccgaggaggcattcggcccggttacgaccctggtgaacaatgcagggattggggtaattaagagcgttgaacggactaccacggaggaatggcgtgatgttctgtccgttaatctggatggtgtttttttcggcacccgtctgggcattcagcgcatgaaaaataaaggcttgggcgctagcatcatcaatatgagcagtattgctgggctggtaggcgctccggccgccggggcatacaacgcttccaagggggcggtacgtatcatgtcgaaaagcgcagcgctggattgcgcactgaaggactacgatgtgcgtgtcaacacagtacatccgggcgcgatcaagaccgaggcgaaggatcagctggaaggttgggagcaggcaatgtcacagcgtacggcgacccctatgggccacattggcgaaccgaatgacatcgcatggatctgtgtgtacctggcatctgacgaatcgaaatttgcgacgggtgcagaatttgtggtcgacggcgggtacaccgcacag

SEQ ID NO: 352 - protein, 252 aa, Artificial Sequence
  Engineered Variant of Kred from Lactobacillus kefir
MTDRLKHKVAIITGGTMGIGLAIADKFVEEGAKVVITGRHADVGEKAAKSIGGSDVIRFVQHDASEEAGWTTLFDTTEEAFGPVTTLVNNAGIGVIKSVERTTTEEWRDVLSVNLDGVFFGTRLGIQRMKNKGLGASIINMSSIAGLVGAPAAGAYNASKGAVRIMSKSAALDCALKDYDVRVNTVHPGAIKTEAKDQLEGWEQAMSQRTATPMGHIGEPNDIAWICVYLASDESKFATGAEFVVDGGYTAQ

SEQ ID NO: 353 - DNA, 756 bp, Artificial Sequence
  Engineered Variant of Kred from Lactobacillus kefir
atgaccgatcgtctgaagcacaaagtagccatcatcaccggcgggacaatgggtatcggtttggcaatcgccgataaatttgtagaggagggtgcgaaagtagttattactggtcgtcacgcggatgtaggtgagaaagccgccaaatcaatcggtggcagtgatgttattcgctttgtccagcacgatgcgtccgaagaagcaggctggacgaccctgttcgacaccaccgaggaggcattcggcccggttacgaccctggtgaacaatgcagggatcggggtcattaagagcgttgaacggactaccacggaggaatggcgtgatgttctgtccgttaatctggatggtgtttttttcggcacccgtctgggcattcagcgcatgaaaaataaaggcttgggcgctagcatcatcaatatgagcagtattatggggctggtaggcgctccggccgccggggcatacaacgcttccaagggggcggtacgtatcatgtcgaaaagcgcagcgctggattgcgcactgaaggactacgatgtgcgtgtcaacacagtacatccgggcgcgatcaagaccgagcgcaaggatcagctggaaggttgggagcaggcaatgtcacagcgtacggcgacccctatgggccacattggcgaaccgaatgacatcgcatggatctgtgtgtacctggcatctgacgaatcgaaatttgcgacgggtgcagaatttgtggtcgacggcgggtacaccgcacag

SEQ ID NO: 354 - protein, 252 aa, Artificial Sequence; identical to SEQ ID NO: 332
  Engineered Variant of Kred from Lactobacillus kefir

SEQ ID NO: 355 - DNA, 756 bp, Artificial Sequence
  Engineered Variant of Kred from Lactobacillus kefir
atgaccgatcgtctgaagcacaaagtagccatcatcaccggcgggacaatgggtatcggtttggcaatcgccgataaatttgtagaggagggtgcgaaagtagttattactggtcgtcacgcggatgtaggtgaaaaagccgccaaatcaatcggtggcagtgatgttattcgctttgtccagcacgatgcgtccgaagaagcaggctggacgaagctgttcgacaccaccgaggaggcattcggcccggttacgaccctggtgaacaatgcagggattggggtaattaagagcgttgaacggactaccacggaggaatggcgtgatgttctgtccgttaatctggatggtgtttttttcggcacccgtctgggcattcagcgcatgaaaaataaaggcttgggcgctagcatcatcaatatgagcagtattatggggctggtaggcgctccgatggccggggcatacaacgcttccaagggggcggtacgtatcatgtcgaaaagcgcagcgctggattgcgcactgaaggactacgatgtgcgtgtcaacacagtacatccgggcgcgatcaagaccgagcgcaaggatcagctggaaggttgggagcaggcaatgtcacagcgtacggcgacccctatgggccacattggcgaaccgaatgacatcgcatggatctgtgtgtacctggcatctgacgaatcgaaatttgcgacgggtgcagaatttgtggtcgacggcgggtacaccgcacag

SEQ ID NO: 356 - protein, 252 aa, Artificial Sequence
  Engineered Variant of Kred from Lactobacillus kefir
MTDRLKHKVAIITGGTMGIGLAIADKFVEEGAKVVITGRHADVGEKAAKSIGGSDVIRFVQHDASEEAGWTKLFDTTEEAFGPVTTLVNNAGIGVIKSVERTTTEEWRDVLSVNLDGVFFGTRLGIQRMKNKGLGASIINMSSIMGLVGAPMAGAYNASKGAVRIMSKSAALDCALKDYDVRVNTVHPGAIKTERKDQLEGWEQAMSQRTATPMGHIGEPNDIAWICVYLASDESKFATGAEFVVDGGYTAQ

SEQ ID NO: 357 - DNA, 756 bp, Artificial Sequence
  Engineered Variant of Kred from Lactobacillus kefir
atgaccgatcgtctgaagcacaaagtagccatcgtcaccggcgggacaatgggtatcggtttggcaatcgccgataaatttgtagaggagggtgcgaaagtagttattactggtcgtcacgcggatgtaggtgaaaaagccgccaaatcaatcggtggcagtgatgttattcgctttgtccagcacgatgcgtccgaagaagcaggctggacgtcgctgttcgacaccaccgaggaggcattcggcccggttacgaccctggtgaacaatgcagggattggggtaattaagagcgttgaacggactaccacggaggaatggcgtaaggttctgtccgttaatctggatggtgtttttttcggcacccgtctgggcattcagcgcatgaaaaataaaggcttgggcgctagcatcatcaatatgagcagtattatggggctggtaggcgctccggccgccggggcatacaacgcttccaagggggcggtacgtatcatgtcgaaaagcgcagcgctggattgcgcactgaaggactacgatgtgcgtgtcaacacagtacatccgggcgcgatcaagaccgagcgcaaggatcagctggaaggttgggagcaggcaatgtcacagcgtacggcgacccctatgggccacattggcgaaccgaatgacatcgcatggatctgtgtgtacctggcatctgacgaatcgaaatttgcgacgggtgcagaatttgtggtcgacggcgggtacaccgcacag

SEQ ID NO: 358 - protein, 252 aa, Artificial Sequence
  Engineered Variant of Kred from Lactobacillus kefir
MTDRLKHKVAIVTGGTMGIGLAIADKFVEEGAKVVITGRHADVGEKAAKSIGGSDVIRFVQHDASEEAGWTSLFDTTEEAFGPVTTLVNNAGIGVIKSVERTTTEEWRKVLSVNLDGVFFGTRLGIQRMKNKGLGASIINMSSIMGLVGAPAAGAYNASKGAVRIMSKSAALDCALKDYDVRVNTVHPGAIKTERKDQLEGWEQAMSQRTATPMGHIGEPNDIAWICVYLASDESKFATGAEFVVDGGYTAQ

SEQ ID NO: 359 - DNA, 756 bp, Artificial Sequence
  Engineered Variant of Kred from Lactobacillus kefir
atgaccgatcgtctgaagcacaaagtagccatcatcaccggcgggacaatgggtatcggtttggcaatcgccgataaatttgtagaggagggtgcgaaagtagttattactggtcgtcacgcggatgtaggtgaaaaagccgccaaatcaatcggtggcagtgatgttattcgctttgtccagcacgatgcgtccgaagaagcaggctggacgtcgctgttcgacaccaccgaggaggcattcggcccggttacgaccctggtgaacaatgcagggattggggtaattaagagcgttgaacggactaccacggaggaatggcgtaaggttctgtccgttaatctggatggtgtttttttcggcacccgtctgggcattcagcgcatgaaaaataaaggcttgggcgctagcatcatcaatatgagcagtattatggggctggtaggcgctccgatggccggggcatacaacgcttccaagggggcggtacgtatcatgtcgaaaagcgcagcgctggattgcgcactgaaggactacgatgtgcgtgtcaacacagtacatccgggcgcgatcaagaccgagcgcaaggatcagctggaaggttgggagcaggcaatgtcacagcgtacggcgacccctatgggccacattggcgaaccgaatgacatcgcatggatctgtgtgtacctggcatctgacgaatcgaaatttgcgacgggtgcagaatttgtggtcgacggcgggtacaccgcacag

SEQ ID NO: 360 - protein, 252 aa, Artificial Sequence
  Engineered Variant of Kred from Lactobacillus kefir
MTDRLKHKVAIITGGTMGIGLAIADKFVEEGAKVVITGRHADVGEKAAKSIGGSDVIRFVQHDASEEAGWTSLFDTTEEAFGPVTTLVNNAGIGVIKSVERTTTEEWRKVLSVNLDGVFFGTRLGIQRMKNKGLGASIINMSSIMGLVGAPMAGAYNASKGAVRIMSKSAALDCALKDYDVRVNTVHPGAIKTERKDQLEGWEQAMSQRTATPMGHIGEPNDIAWICVYLASDESKFATGAEFVVDGGYTAQ

SEQ ID NO: 361 - DNA, 756 bp, Artificial Sequence
  Engineered Variant of Kred from Lactobacillus kefir
atgaccgatcgtctgaagcacaaagtagccatcatcaccggcgggacaatgggtatcggtttggcaatcgccgataaatttgtagaggagggtgcgaaagtagttattactggtcgtcacgcggatgtaggtgaaaaagccgccaaatcaatcggtggcagtgatgttattcgctttgtccagcacgatgcgtccgaagaagcaggctggacgtcgctgttcgacaccaccgaggaggcattcggcccggttacgaccctggtgaacaatgcagggattggggtaattaagagcgttgaacggactaccacggaggaatggcgtaaggttctgtccgttaatctggatggtgtttttttcggcacccgtctgggcattcagcgcatgaaaaataaaggcttgggcgctagcatcatcaatatgagcagtattatggggctggtaggcgctccggccgccggggcatacaacgcttccaagggggcggtacgtatcatgtcgaaaagcgcagcgctggattgcgcactgaaggactacgatgtgcgtgtcaacacagtacatccgggcgcgatcaagaccgagcgcaaggatcagctggaaggttgggagcaggcaatgtcacagcgtacggcgacccctatgggccacattggcgaaccgaatgacatcgcatggatctgtgtgtacctggcatctgacgaatcgaaatttgcgacgggtgcagaatttgtggtcgacggcgggtacaccgcacag

SEQ ID NO: 362 - protein, 252 aa, Artificial Sequence
  Engineered Variant of Kred from Lactobacillus kefir
MTDRLKHKVAIITGGTMGIGLAIADKFVEEGAKVVITGRHADVGEKAAKSIGGSDVIRFVQHDASEEAGWTSLFDTTEEAFGPVTTLVNNAGIGVIKSVERTTTEEWRKVLSVNLDGVFFGTRLGIQRMKNKGLGASIINMSSIMGLVGAPAAGAYNASKGAVRIMSKSAALDCALKDYDVRVNTVHPGAIKTERKDQLEGWEQAMSQRTATPMGHIGEPNDIAWICVYLASDESKFATGAEFVVDGGYTAQ

SEQ ID NO: 363 - DNA, 756 bp, Artificial Sequence
  Engineered Variant of Kred from Lactobacillus kefir
atgaccgatcgtctgaagcacaaagtagccatcatcaccggcgggacaatgggtatcggtttggcaatcgccgataaatttgtagaggagggtgcgaaagtagttattactggtcgtcacgcggatgtaggtgaaaaagccgccaaatcaatcggtggcagtgatgttattcgctttgtccagcacgatgcgtccgaagaagcaggctggacgaagctgttcgacaccaccgaggaggcattcggcccggttacgaccctggtgaacaatgcagggattggggtaattaagagcgttgaacggactaccacggaggaatggcgtgatgttctgtccgttaatctggatggtgtttttttcggcacccgtctgggcattcagcgcatgaaaaataaaggcttgggcgctagcatcatcaatatgagcagtattatggggctggtaggcgctccggccgccggggcatacaacgcttccaagggggcggtacgtatcatgtcgaaaagcgcagcgctggattgcgcactgaaggactacgatgtgcgtgtcaacacagtacatccgggcgcgatcaagaccgagcgcaaggatcagctggaaggttgggagcaggcaatgtcacagcgtacggcgacccctatgggccacattggcgaaccgaatgacatcgcatggatctgtgtgtacctggcatctgacgaatcgaaatttgcgacgggtgcagaatttgtggtcgacggcgggtacaccgcacag

SEQ ID NO: 364 - protein, 252 aa, Artificial Sequence
  Engineered Variant of Kred from Lactobacillus kefir
MTDRLKHKVAIITGGTMGIGLAIADKFVEEGAKVVITGRHADVGEKAAKSIGGSDVIRFVQHDASEEAGWTKLFDTTEEAFGPVTTLVNNAGIGVIKSVERTTTEEWRDVLSVNLDGVFFGTRLGIQRMKNKGLGASIINMSSIMGLVGAPAAGAYNASKGAVRIMSKSAALDCALKDYDVRVNTVHPGAIKTERKDQLEGWEQAMSQRTATPMGHIGEPNDIAWICVYLASDESKFATGAEFVVDGGYTAQ

SEQ ID NO: 365 - DNA, 756 bp, Artificial Sequence
  Engineered Variant of Kred from Lactobacillus kefir
atgaccgatcgtctgaagcacaaagtagccatcatcaccggcgggacaatgggtatcggtttggcaatcgccgataaatttgtagaggagggtgcgaaagtagttattactggtcgtcacgcggatgtaggtgagaaagccgccaaatcaatcggtggcagtgatgttattcgctttgtccagcacgatgcgtccgaagaagcaggctggacgaccctgttcgacaccaccgaggaggcattcggcccggttacgaccctggtgaacaatgcaggggccggggtaattaagagcgttgaacggactaccacggaggaatggcgtgatgttctgtccgttaatctggatggtgtttttttcggcacccgtctgggcattcagcgcatgaaaaataaaggcttgggcgctagcatcatcaatatgagcagtattatggggctggtaggcgctccggccgccggggcatacaacgcttccaagggggcggtacgtatcatgtcgaaaagcgcagcgctggattgcgcactgaaggactacgatgtgcgtgtcaacacagtacatccgggcgcgatcaagaccgagtcgaaggatcagctggaaggttgggagcaggcaatgtcacagcgtacggcgacccctatgggccacattggcgaaccgaatgacatcgcatggatctgtgtgtacctggcatctgacgaatcgaaatttgcgacgggtgcagaatttgtggtcgacggcgggtacaccgcacag

SEQ ID NO: 366 - protein, 252 aa, Artificial Sequence
  Engineered Variant of Kred from Lactobacillus kefir
MTDRLKHKVAIITGGTMGIGLAIADKFVEEGAKVVITGRHADVGEKAAKSIGGSDVIRFVQHDASEEAGWTTLFDTTEEAFGPVTTLVNNAGAGVIKSVERTTTEEWRDVLSVNLDGVFFGTRLGIQRMKNKGLGASIINMSSIMGLVGAPAAGAYNASKGAVRIMSKSAALDCALKDYDVRVNTVHPGAIKTESKDQLEGWEQAMSQRTATPMGHIGEPNDIAWICVYLASDESKFATGAEFVVDGGYTAQ

SEQ ID NO: 367 - DNA, 756 bp, Artificial Sequence
  Engineered Variant of Kred from Lactobacillus kefir
atgaccgatcgtctgaagcacaaagtagccatcatcaccggcgggacaatgggtatcggtttggcaatcgccgataaatttgtagaggagggtgcgaaagtagttattactggtcgtcacgcggatgtaggtgagaaagccgccaaatcaatcggtggcagtgatgttattcgctttgtccagcacgatgcgtccgaagaagcaggctggacgaccctgttcgacaccaccgaggaggcattcggcccggttacgaccctggtgaacaatgcagggattggggtaattaagagcgttgaacggactaccacggaggaatggcgtgatgttctgtccgttaatctggatggtgtttttttcggcacccgtctgggcattcagcgcatgaaaaataaaggcttgggcgctagcatcatcaatatgagcagtattatggggctggtaggcgctccggccgccggggcatacaacgcttccaagggggcggtacgtatcatgtcgaaaagcgcagcgctggattgcgcactgaaggactacgatgttcgtgtcaacacagtacatccgggcgcgatcaagaccaactcgaaggatcagctggagggttgggagcaggcaatgtcacagcgtacggcgacccctatgggccacattggcgaaccgaatgacatcgcatggatctgtgtgtacctggcatctgacgaatcgaaatttgcgacgggtgcagaatttgtggtcgacggcgggtacaccgcacag

SEQ ID NO: 368 - protein, 252 aa, Artificial Sequence
  Engineered Variant of Kred from Lactobacillus kefir
MTDRLKHKVAIITGGTMGIGLAIADKFVEEGAKVVITGRHADVGEKAAKSIGGSDVIRFVQHDASEEAGWTTLFDTTEEAFGPVTTLVNNAGIGVIKSVERTTTEEWRDVLSVNLDGVFFGTRLGIQRMKNKGLGASIINMSSIMGLVGAPAAGAYNASKGAVRIMSKSAALDCALKDYDVRVNTVHPGAIKTNSKDQLEGWEQAMSQRTATPMGHIGEPNDIAWICVYLASDESKFATGAEFVVDGGYTAQ

SEQ ID NO: 369 - DNA, 756 bp, Artificial Sequence
  Engineered Variant of Kred from Lactobacillus kefir
atgaccgatcgtctgaagcacaaagtagccatcatcaccggcgggacaatgggtatcggtttggcaatcgccgataaatttgtagaggagggtgcgaaagtagttattactggtcgtcacgcggatgtaggtgagaaagccgccaaatcaatcggtggcagtgatgttattcgctttgtccagcacgatgcgtccgaagaagcaggctggacgaccctgttcgacaccaccgaggaggcattcggcccggttacgaccctggtgaacaatgcagggattggggtaattaagagcgttgaacggactaccacggaggaatggcgtgatgttctgtccgttaatctggatggtgtttttttcggcacccgtctgggcattcagcgcatgaaaaataaaggcttgggcgctagcatcatcaatatgagcagtattatggggctggtaggcgctccggccgccggggcatacaacgcttccaagggggcggtacgtatcatgtcgaaaagcgcagcgctggattgcgcactgaaggactacgatgttcgtgtcaacacagtacatccgggcgcgatcaagaccaactcgaaggatcagctgccaggttgggagcaggcaatgtcacagcgtacggcgacccctatgggccacattggcgaaccgaatgacatcgcatggatctgtgtgtacctggcatctgacgaatcgaaatttgcgacgggtgcagaatttgtggtcgacggcgggtacaccgcacag

SEQ ID NO: 370 - protein, 252 aa, Artificial Sequence
  Engineered Variant of Kred from Lactobacillus kefir
MTDRLKHKVAIITGGTMGIGLAIADKFVEEGAKVVITGRHADVGEKAAKSIGGSDVIRFVQHDASEEAGWTTLFDTTEEAFGPVTTLVNNAGIGVIKSVERTTTEEWRDVLSVNLDGVFFGTRLGIQRMKNKGLGASIINMSSIMGLVGAPAAGAYNASKGAVRIMSKSAALDCALKDYDVRVNTVHPGAIKTNSKDQLPGWEQAMSQRTATPMGHIGEPNDIAWICVYLASDESKFATGAEFVVDGGYTAQ

SEQ ID NO: 371 - DNA, 756 bp, Artificial Sequence
  Engineered Variant of Kred from Lactobacillus kefir
atgaccgatcgtctgaagcacaaagtagccatcatcaccggcgggacaatgggtatcggtttggcaatcgccgataaatttgtagaggagggtgcgaaagtagttattactggtcgtcacgcggatgtaggtgagaaagccgccaaatcaatcggtggcagtgatgttattcgctttgtccagcacgatgcgtccgaagaagcaggctggacgaccctgttcgacaccaccgaggaggcattcggcccggttacgaccctggtgaacaatgcagggattggggtaattaagagcgttgaacggactaccacggaggaatggcgtgatgttctgtccgttaatctggatggtgtttttttcggcacccgtctgggcattcagcgcatgaaaaataaaggcttgggcgctagcatcatcaatatgagcagtattatggggctggtaggcgctccggccgccggggcatacaacgcttccaagggggcggtacgtatcatgtcgaaaagcgcagcgctggattgcgcactgaaggactacgatgtgcgtgtcaacacagtacatccgggcgcgatcaagaccgaatcgaaggatcagctgccaggttgggagcaggcaatgtcacagcgtacggcgacccctatgggccacattggcgaaccgaatgacatcgcatggatctgtgtgtacctggcatctgacgaatcgaaatttgcgacgggtgcagaatttgtggtcgacggcgggtacaccgcacag

SEQ ID NO: 372 - protein, 252 aa, Artificial Sequence
  Engineered Variant of Kred from Lactobacillus kefir
MTDRLKHKVAIITGGTMGIGLAIADKFVEEGAKVVITGRHADVGEKAAKSIGGSDVIRFVQHDASEEAGWTTLFDTTEEAFGPVTTLVNNAGIGVIKSVERTTTEEWRDVLSVNLDGVFFGTRLGIQRMKNKGLGASIINMSSIMGLVGAPAAGAYNASKGAVRIMSKSAALDCALKDYDVRVNTVHPGAIKTESKDQLPGWEQAMSQRTATPMGHIGEPNDIAWICVYLASDESKFATGAEFVVDGGYTAQ

SEQ ID NO: 373 - DNA, 756 bp, Artificial Sequence
  Engineered Variant of Kred from Lactobacillus kefir
atgaccgatcgtctgaagcacaaagtagccatcatcaccggcgggacaatgggtatcggtttggcaatcgccgataaatttgtagaggagggtgcgaaagtagttattactggtcgtcacgcggatgtaggtgagaaagccgccaaatcaatcggtggcagtgatgttattcgctttgtccagcacgatgcgtccgaagaagcaggctggacgaccctgttcgacaccaccgaggcggcattcggcccggttacgaccctggtgaacaatgcagggattggggtaattaagagcgttgaacggactaccacggaggaatggcgtgatgttctgtccgttaatctggatggtgtttttttcggcacccgtctgggcattcagcgcatgaaaaataaaggcttgggcgctagcatcatcaatatgagcagtattatggggctggtaggcgctccggccgccggggcatacaacgcttccaagggggcggtacgtatcatgtcgaaaagcgcagcgctggattgcgcactgaaggactacgatgtgcgtgtcaacacagtacatccgggcgcgatcaagaccgagtcgaaggatcagctggaaggttgggagcaggcaatgtcacagcgtacggcgacccctatgggccacattggcgaaccgaatgacatcgcatggatctgtgtgtacctggcatctgacgaatcgaaatttgcgacgggtgcagaatttgtggtcgacggcgggtacaccgcacag

SEQ ID NO: 374 - protein, 252 aa, Artificial Sequence
  Engineered Variant of Kred from Lactobacillus kefir
MTDRLKHKVAIITGGTMGIGLAIADKFVEEGAKVVITGRHADVGEKAAKSIGGSDVIRFVQHDASEEAGWTTLFDTTEAAFGPVTTLVNNAGIGVIKSVERTTTEEWRDVLSVNLDGVFFGTRLGIQRMKNKGLGASIINMSSIMGLVGAPAAGAYNASKGAVRIMSKSAALDCALKDYDVRVNTVHPGAIKTESKDQLEGWEQAMSQRTATPMGHIGEPNDIAWICVYLASDESKFATGAEFVVDGGYTAQ

SEQ ID NO: 375 - DNA, 756 bp, Artificial Sequence
  Engineered Variant of Kred from Lactobacillus kefir
atgaccgatcgtctgaagcacaaagtagccatcatcaccggcgggacaatgggtatcggtttggcaatcgccgataaatttgtagaggagggtgcgaaagtagttattactggtcgtcacgcggatgtaggtgagaaagccgccaaatcaatcggtggcagtgatgttattcgctttgtccagcacgatgcgtccgaagaagcaggctggacgaccctgttcgacaccaccgaggaggcattcggcccggttacgaccctggtgaacaatgcagggattggggttccgaagagcgttgaacggactaccacggaggaatggcgtgatgttctgtccgttaatctggatggtgtttttttcggcacccgtctgggcattcagcgcatgaaaaataaaggcttgggcgctagcatcatcaatatgagcagtattatggggctggtaggcgctccggccgccggggcatacaacgcttccaagggggcggtacgtatcatgtcgaaaagcgcagcgctggattgcgcactgaaggactacgatgtgcgtgtcaacacagtacatccgggcgcgatcaagaccaactcgaaggatcagctgccaggttgggagcaggcaatgtcacagcgtacggcgacccctatgggccacattggcgaaccgaatgacatcgcatggatctgtgtgtacctggcatctgacgaatcgaaatttgcgacgggtgcagaatttgtggtcgacggcgggtacaccgcacag

SEQ ID NO: 376 - protein, 252 aa, Artificial Sequence
  Engineered Variant of Kred from Lactobacillus kefir
MTDRLKHKVAIITGGTMGIGLAIADKFVEEGAKVVITGRHADVGEKAAKSIGGSDVIRFVQHDASEEAGWTTLFDTTEEAFGPVTTLVNNAGIGVPKSVERTTTEEWRDVLSVNLDGVFFGTRLGIQRMKNKGLGASIINMSSIMGLVGAPAAGAYNASKGAVRIMSKSAALDCALKDYDVRVNTVHPGAIKTNSKDQLPGWEQAMSQRTATPMGHIGEPNDIAWICVYLASDESKFATGAEFVVDGGYTAQ

SEQ ID NO: 377 - DNA, 756 bp, Artificial Sequence
  Engineered Variant of Kred from Lactobacillus kefir
atgaccgatcgtctgaagcacaaagtagccatcatcaccggcgggacaatgggtatcggtttggcaatcgccgataaatttgtagaggagggtgcgaaagtagttattactggtcgtcacgcggatgtaggtgagaaagccgccaaatcaatcggtggcagtgatgttattcgctttgtccagcacgatgcgtccgaagaagcaggctggacgaccctgttcgacaccaccgaggaggcattcggcccggttacgaccctggtgaacaatgcagggattggggttccgaagagcgttgaacggactaccacggaggaatggagtgatgttctgtccgttaatctggatggtgtttttttcggcacccgtctgggcattcagcgcatgaaaaataaaggcttgggcgctagcatcatcaatatgagcagtattatggggatcgtaggcgctccggccgccggggcatacaacgcttccaagggggcggtacgtatcatgtcgaaaagcgcagcgctggattgcgcactgaaggactacgatgtgcgtgtcaacacagtacatccgggcgcgatcaagaccgaatcgaaggatcagctgccaggttgggagcaggcaatgtcacagcgtacggcgacccctatgggccacattggcgaaccgaatgacatcgcatggatctgtgtgtacctggcatctgacgaatcgaaatttgcgacgggtgcagaatttgtggtcgacggcgggtacaccgcacag

SEQ ID NO: 378 - protein, 252 aa, Artificial Sequence
  Engineered Variant of Kred from Lactobacillus kefir
MTDRLKHKVAIITGGTMGIGLAIADKFVEEGAKVVITGRHADVGEKAAKSIGGSDVIRFVQHDASEEAGWTTLFDTTEEAFGPVTTLVNNAGIGVPKSVERTTTEEWSDVLSVNLDGVFFGTRLGIQRMKNKGLGASIINMSSIMGIVGAPAAGAYNASKGAVRIMSKSAALDCALKDYDVRVNTVHPGAIKTESKDQLPGWEQAMSQRTATPMGHIGEPNDIAWICVYLASDESKFATGAEFVVDGGYTAQ

SEQ ID NO: 379 - DNA, 756 bp, Artificial Sequence
  Engineered Variant of Kred from Lactobacillus kefir
atgaccgatcgtctgaagcacaaagtagccatcatcaccggcgggacaatgggtatcggtttggcaatcgccgataaatttgtagaggagggtgcgaaagtagttattactggtcgtcacgcggatgtaggtgagaaagccgccaaatcaatcggtggcagtgatgttattcgctttgtccagcacgatgcgtccgaagaagcaggctggacgaccctgttcgacaccaccgaggaggcattcggcccggttacgaccctggtgaacaatgcagggattggggtaattaagagcgttgaacggactaccacggaggaatggcgtgatgttctgtccgttaatctggatggtgtttttttcggcacccgtctgggcattcagcgcatgaaaaataaaggcttgggcgctagcatcatcaatatgagcagtattatggggctggtaggcgctccggccgccggggcatacaacgcttccaagggggcggtacgtatcatgtcgaaaagcgcagcgctggattgcgcactgaaggactacgatgtgcgtgtcaacacagtacatccgggcgcgatccgcaccgagtcgaaggatcagctggaaggttgggagcaggcaatgtcacagcgtacggcgacccctatgggccacattggcgaaccgaatgacatcgcatggatctgtgtgtacctggcatctgacgaatcgaaatttgcgacgggtgcagaatttgtggtcgacggcgggtacaccgcacag

SEQ ID NO: 380 - protein, 252 aa, Artificial Sequence
  Engineered Variant of Kred from Lactobacillus kefir
MTDRLKHKVAIITGGTMGIGLAIADKFVEEGAKVVITGRHADVGEKAAKSIGGSDVIRFVQHDASEEAGWTTLFDTTEEAFGPVTTLVNNAGIGVIKSVERTTTEEWRDVLSVNLDGVFFGTRLGIQRMKNKGLGASIINMSSIMGLVGAPAAGAYNASKGAVRIMSKSAALDCALKDYDVRVNTVHPGAIRTESKDQLEGWEQAMSQRTATPMGHIGEPNDIAWICVYLASDESKFATGAEFVVDGGYTAQ

SEQ ID NO: 381 - DNA, 756 bp, Artificial Sequence
  Engineered Variant of Kred from Lactobacillus kefir
atgaccgatcgtctgaagcacaaagtagccatcatcaccggcgggacaatgggtatcggtttggcaatcgccgataaatttgtagaggagggtgcgaaagtagttattactggtcgtcacgcggatgtaggtgagaaagccgccaaatcaatcggtggcagtgatgttattcgctttgtccagcacgatgcgtccgaagaagcaggctggacgaccctgttcgacaccaccgaggaggcattcggcccggttacgaccctggtgaacaatgcagggattggggtaattaagagcgttgaacggactaccacggaggaatggcgtgatgttctgtccgttaatctggatggtgtttttttcggcacccgtctgggcattcagcgcatgaaaaataaaggcttgggcgctagcatcatcaatatgagcagtattatggggattgtaggcgctccggccgccggggcatacaacgcttccaagggggcggtacgtatcatgtcgaaaagcgcagcgctggattgcgcactgaaggactacgatgtgcgtgtcaacacagtacatccgggcgcgatcaagaccgagtcgaaggatcagctggaaggttgggagcaggcaatgtcacagcgtacggcgacccctatgggccacattggcgaaccgaatgacatcgcatggatctgtgtgtacctggcatctgacgaatcgaaatttgcgacgggtgcagaatttgtggtcgacggcgggtacaccgcacag

SEQ ID NO: 382 - protein, 252 aa, Artificial Sequence
  Engineered Variant of Kred from Lactobacillus kefir
MTDRLKHKVAIITGGTMGIGLAIADKFVEEGAKVVITGRHADVGEKAAKSIGGSDVIRFVQHDASEEAGWTTLFDTTEEAFGPVTTLVNNAGIGVIKSVERTTTEEWRDVLSVNLDGVFFGTRLGIQRMKNKGLGASIINMSSIMGIVGAPAAGAYNASKGAVRIMSKSAALDCALKDYDVRVNTVHPGAIKTESKDQLEGWEQAMSQRTATPMGHIGEPNDIAWICVYLASDESKFATGAEFVVDGGYTAQ

SEQ ID NO: 383 - DNA, 756 bp, Artificial Sequence
  Engineered Variant of Kred from Lactobacillus kefir
atgaccgatcgtctgaagcacaaagtagccatcatcaccggcgggacaatgggtatcggtttggcaatcgccgataaatttgtagaggagggtgcgaaagtagttattactggtcgtcacgcggatgtaggtgagaaagccgccaaatcaatcggtggcagtgatgttattcgctttgtccagcacgatgcgtccgaagaagcaggctggacgaccctgttcgacaccaccgaggaggcattcggcccggttacgaccctggtgaacaatgcagggattggggtaattaagagcgttgaacgcactaccacggaggaatggcgtgatgttctgtccgttaatctggatggtgtttttttcggcacccgtctgggcattcagcgcatgaaaaataaaggcttgggcgctagcatcatcaatatgagcagtattatggggatcgtaggcgctccggccgccggggcatacaacgcttccaagggggcggtacgtatcatgtcgaaaagcgcagcgctggattgcgcactgaaggactacgatgtgcgtgtcaacacagtacatccgggcgcgatcaagaccgaatcgaaggatcagctgccaggttgggagcaggcaatgtcacagcgtacggcgacccctatgggccacattggcgaaccgaatgacatcgcatggatctgtgtgtacctggcatctgacgaatcgaaatttgcgacgggtgcagaatttgtggtcgacggcgggtacaccgcacag

SEQ ID NO: 384 - protein, 252 aa, Artificial Sequence
  Engineered Variant of Kred from Lactobacillus kefir
MTDRLKHKVAIITGGTMGIGLAIADKFVEEGAKVVITGRHADVGEKAAKSIGGSDVIRFVQHDASEEAGWTTLFDTTEEAFGPVTTLVNNAGIGVIKSVERTTTEEWRDVLSVNLDGVFFGTRLGIQRMKNKGLGASIINMSSIMGIVGAPAAGAYNASKGAVRIMSKSAALDCALKDYDVRVNTVHPGAIKTESKDQLPGWEQAMSQRTATPMGHIGEPNDIAWICVYLASDESKFATGAEFVVDGGYTAQ

SEQ ID NO: 385 - DNA, 756 bp, Artificial Sequence
  Engineered Variant of Kred from Lactobacillus kefir
atgaccgatcgtctgaagcacaaagtagccatcatcaccggcgggacaatgggtatcggtttggcaatcgccgataaatttgtagaggagggtgcgaaagtagttattactggtcgtcacgcggatgtaggtgagaaagccgccaaatcaatcggtggcagtgatgttattcgctttgtccagcacgatgcgtccgaagaagcaggctggacgaccgtgttcgacaccaccgaggaggcattcggcccggttacgaccctggtgaacaatgcagggattggggtaattaagagcgttgaacggactaccacggaggaatggcgtgatgttctgtccgttaatctggatggtgtttttttcggcacccgtctgggcattcagcgcatgaaaaataaaggcttgggcgctagcatcatcaatatgagcagtattatggggctggtaggcgctccggccgccggggcatacaacgcttccaagggggcggtacgtatcatgtcgaaaagcgcagcgctggattgcgcactgaaggactacgatgtgcgtgtcaacacagtacatccgggcgcgatcaagaccgaatcgaaggatcagctggagggttgggagcaggcaatgtcacagcgtacggcgacccctatgggccacattggcgaaccgaatgacatcgcatggatctgtgtgtacctggcatctgacgaatcgaaatttgcgacgggtgcagaatttgtggtcgacggcgggtacaccgcacag

SEQ ID NO: 386 - protein, 252 aa, Artificial Sequence
  Engineered Variant of Kred from Lactobacillus kefir
MTDRLKHKVAIITGGTMGIGLAIADKFVEEGAKVVITGRHADVGEKAAKSIGGSDVIRFVQHDASEEAGWTTVFDTTEEAFGPVTTLVNNAGIGVIKSVERTTTEEWRDVLSVNLDGVFFGTRLGIQRMKNKGLGASIINMSSIMGLVGAPAAGAYNASKGAVRIMSKSAALDCALKDYDVRVNTVHPGAIKTESKDQLEGWEQAMSQRTATPMGHIGEPNDIAWICVYLASDESKFATGAEFVVDGGYTAQ

SEQ ID NO: 387 - DNA, 756 bp, Artificial Sequence
  Engineered Variant of Kred from Lactobacillus kefir
atgaccgatcgtctgaagcacaaagtagccatcatcaccggcgggacaatgggtatcggtttggcaatcgccgataaatttgtagaggagggtgcgaaagtagttattactggtcgtcacgcggatgtaggtgagaaagccgccaaatcaatcggtggcagtgatgttattcgctttgtccagcacgatgcgtccgaagaagcaggctggacgaccgtgttcgacaccaccgaggaggcattcggcccggttacgaccctggtgaacaatgcagggattggggttatcaagagcgttgaacgcactaccacggaggaatggcgtgatgttctgtccgttaatctggatggtgtttttttcggcacccgtctgggcattcagcgcatgaaaaataaaggcttgggcgctagcatcatcaatatgagcagtattatggggatcgtaggcgctccggccgccggggcatacaacgcttccaagggggcggtacgtatcatgtcgaaaagcgcagcgctggattgcgcactgaaggactacgatgtgcgtgtcaacacagtacatccgggcgcgatcaagaccgaatcgaaggatcagctggagggttgggagcaggcaatgtcacagcgtacggcgacccctatgggccacattggcgaaccgaatgacatcgcatggatctgtgtgtacctggcatctgacgaatcgaaatttgcgacgggtgcagaatttgtggtcgacggcgggtacaccgcacag

SEQ ID NO: 388 - protein, 252 aa, Artificial Sequence
  Engineered Variant of Kred from Lactobacillus kefir
MTDRLKHKVAIITGGTMGIGLAIADKFVEEGAKVVITGRHADVGEKAAKSIGGSDVIRFVQHDASEEAGWTTVFDTTEEAFGPVTTLVNNAGIGVIKSVERTTTEEWRDVLSVNLDGVFFGTRLGIQRMKNKGLGASIINMSSIMGIVGAPAAGAYNASKGAVRIMSKSAALDCALKDYDVRVNTVHPGAIKTESKDQLEGWEQAMSQRTATPMGHIGEPNDIAWICVYLASDESKFATGAEFVVDGGYTAQ

SEQ ID NO: 389 - DNA, 756 bp, Artificial Sequence
  Engineered Variant of Kred from Lactobacillus kefir
atgaccgatcgtctgaagcacaaagtagccatcatcaccggcgggacagccggtatcggtttggcaatcgccgataaatttgtagaggagggtgcgaaagtagttattactggtcgtcacgcggatgtaggtgagaaagccgccaaatcaatcggtggcagtgatgttattcgctttgtccagcacgatgcgtccgaagaagcaggctggacgaccctgttcgacaccaccgaggaggcattcggcccggttacgaccctggtgaacaatgcagggattggggtaattaagagcgttgaacggactaccacggaggaatggcgtgatgttctgtccgttaatcaggatggtgtttttttcggcacccgtctgggcattcagcgcatgaaaaataaaggcttgggcgctagcatcatcaatatgagcagtattatggggctggtaggcgctccggccgccggggcatacaacgcttccaagggggcggtacgtatcatgtcgaaaagcgcagcgctggattgcgcactgaaggactacgatgtgcgtgtcaacacagtacatccgggcgcgatcaagaccgagtcgaaggatcagctggaaggttgggagcaggcaatgtcacagcgtacggcgacccctatgggccacattggcgaaccgaatgacatcgcatggatctgtgtgtacctggcatctgacgaatcgaaatttgcgacgggtgcagaatttgtggtcgacggcgggtacaccgcacag

SEQ ID NO: 390 - protein, 252 aa, Artificial Sequence
  Engineered Variant of Kred from Lactobacillus kefir
MTDRLKHKVAIITGGTAGIGLAIADKFVEEGAKVVITGRHADVGEKAAKSIGGSDVIRFVQHDASEEAGWTTLFDTTEEAFGPVTTLVNNAGIGVIKSVERTTTEEWRDVLSVNQDGVFFGTRLGIQRMKNKGLGASIINMSSIMGLVGAPAAGAYNASKGAVRIMSKSAALDCALKDYDVRVNTVHPGAIKTESKDQLEGWEQAMSQRTATPMGHIGEPNDIAWICVYLASDESKFATGAEFVVDGGYTAQ

SEQ ID NO: 391 - DNA, 756 bp, Artificial Sequence
  Engineered Variant of Kred from Lactobacillus kefir
atgaccgatcgtctgaagcacaaagtagccatcatcaccggcgggacagccggtatcggtttggcaatcgccgataaatttgtagaggagggtgcgaaagtagttattactggtcgtcacgcggatgtaggtgagaaagccgccaaatcaatcggtggcagtgatgttattcgctttgtccagcacgatgcgtccgaagaagcaggctggacgaccgtgttcgacaccaccgaggaggcattcggcccggttacgaccctggtgaacaatgcagggattggggtaattaagagcgttgaacggactaccacggaggaatggcgtgatgttctgtccgttaatctggatggtgtttttttcggcacccgtctgggcattcagcgcatgaaaaataaaggcttgggcgctagcatcatcaatatgagcagtattatggggctggtaggcgctccggccgccggggcatacaacgcttccaagggggcggtacgtatcatgtcgaaaagcgcagcgctggattgcgcactgaaggactacgatgtgcgtgtcaacacagtacatccgggcgcgatcaagaccgaatcgaaggatcagctgccaggttgggagcaggcaatgtcacagcgtacggcgacccctatgggccacattggcgaaccgaatgacatcgcatggatctgtgtgtacctggcatctgacgaatcgaaatttgcgacgggtgcagaatttgtggtcgacggcgggtacaccgcacag

SEQ ID NO: 392 - protein, 252 aa, Artificial Sequence
  Engineered Variant of Kred from Lactobacillus kefir
MTDRLKHKVAIITGGTAGIGLAIADKFVEEGAKVVITGRHADVGEKAAKSIGGSDVIRFVQHDASEEAGWTTVFDTTEEAFGPVTTLVNNAGIGVIKSVERTTTEEWRDVLSVNLDGVFFGTRLGIQRMKNKGLGASIINMSSIMGLVGAPAAGAYNASKGAVRIMSKSAALDCALKDYDVRVNTVHPGAIKTESKDQLPGWEQAMSQRTATPMGHIGEPNDIAWICVYLASDESKFATGAEFVVDGGYTAQ

SEQ ID NO: 393 - DNA, 756 bp, Artificial Sequence
  Engineered Variant of Kred from Lactobacillus kefir
atgaccgatcgtctgaagcacaaagtagccatcatcaccggcgggacaatgggtatcggtttggcaatcgccgataaatttgtagaggagggtgcgaaagtagttattactggtcgtcacgcggatgtaggtgagaaagccgccaaatcaatcggtggcagtgatgttattcgctttgtccagcacgatgcgtccgaagaagcaggctggacgaccctgttcgacaccaccgaggaggcattcggcccggttacgaccctggtgaacaatgcagggattggggtaattaagagcgttgaacggactaccacggaggaatggcgtgatgttctgtccgttaatctggatggtgtttttttcggcacccgtctgggcattcagcgcatgaaaaataaaggcttgggcgctagcatcatcaatatgagcagtattatggggctggtaggcgctccggccgccggggcatacaacgcttccaagggggcggtacgtatcatgtcgaaaagcgcagcgctggattgcgcactgaaggactacgatgtgcgtgtcaacacagtacatccgggcgcgatcaagaccgagtcgaaggatggcctggaaggttgggagcaggcaatgtcacagcgtacggcgacccctatgggccacattggcgaaccgaatgacatcgcatggatctgtgtgtacctggcatctgacgaatcgaaatttgcgacgggtgcagaatttgtggtcgacggcgggtacaccgcacag

SEQ ID NO: 394 - protein, 252 aa, Artificial Sequence
  Engineered Variant of Kred from Lactobacillus kefir
MTDRLKHKVAIITGGTMGIGLAIADKFVEEGAKVVITGRHADVGEKAAKSIGGSDVIRFVQHDASEEAGWTTLFDTTEEAFGPVTTLVNNAGIGVIKSVERTTTEEWRDVLSVNLDGVFFGTRLGIQRMKNKGLGASIINMSSIMGLVGAPAAGAYNASKGAVRIMSKSAALDCALKDYDVRVNTVHPGAIKTESKDGLEGWEQAMSQRTATPMGHIGEPNDIAWICVYLASDESKFATGAEFVVDGGYTAQ

SEQ ID NO: 395 - DNA, 756 bp, Artificial Sequence
  Engineered Variant of Kred from Lactobacillus kefir
atgaccgatcgtctgaagcacaaagtagccatcatcaccggcgggacaatgggtatcggtttggcaatcgccgataaatttgtagaggagggtgcgaaagtagttattactggtcgtcacgcggatgtaggtgagaaagccgccaaatcaatcggtggcagtgatgttattcgctttgtccagcacgatgcgtccgaagaagcaggctggacgaccctgttcgacaccaccgaggaggcattcggcccggttacgaccctggtgaacaatgcagggattggggtaattaagagcgttgaacggactaccacggaggaatggcgtgatgttctgtccgttaatctggatggtgtttttttcggcacccgtctgggcattcagcgcatgaaaaataaaggcttgggcgctagcatcatcaatatgagcagtattatggggctggtaggcgctccggccgccggggcatacaacgcttccaagggggcggtacgtatcatgtcgaaaagcgcagcgctggattgcgcactgaaggactacgatgtgcgtgtcaacacagtacatccgggcgcgatcaagaccgagtcgaaggatcgcctggaaggttgggagcaggcaatgtcacagcgtacggcgacccctatgggccacattggcgaaccgaatgacatcgcatggatctgtgtgtacctggcatctgacgaatcgaaatttgcgacgggtgcagaatttgtggtcgacggcgggtacaccgcacag

SEQ ID NO: 396 - protein, 252 aa, Artificial Sequence
  Engineered Variant of Kred from Lactobacillus kefir
MTDRLKHKVAIITGGTMGIGLAIADKFVEEGAKVVITGRHADVGEKAAKSIGGSDVIRFVQHDASEEAGWTTLFDTTEEAFGPVTTLVNNAGIGVIKSVERTTTEEWRDVLSVNLDGVFFGTRLGIQRMKNKGLGASIINMSSIMGLVGAPAAGAYNASKGAVRIMSKSAALDCALKDYDVRVNTVHPGAIKTESKDRLEGWEQAMSQRTATPMGHIGEPNDIAWICVYLASDESKFATGAEFVVDGGYTAQ

SEQ ID NO: 397 - DNA, 756 bp, Artificial Sequence
  Engineered Variant of Kred from Lactobacillus kefir
atgaccgatcgtctgaagcacaaagtagccatcatcaccggcgggacaatgggtatcggtttggcaatcgccgataaatttgtagaggagggtgcgaaagtagttattactggtcgtcacgcggatgtaggtgagaaagccgccaaatcaatcggtggcagtgatgttattcgctttgtccagcacgatgcgtccgaagaacgtggctggacggacctgttcgacaccaccgaggaggcattcggcccggttacgaccctggtgaacaatgcagggattggggtaattaagagcgttgaacaaactactacggaggaatggcgtgatgttctgtccgttaatctggatggtgtttttttcggcacccgtctgggcattcagcgcatgaaaaataaaggcttgggcgctagcatcatcaatatgagcagtattatggggctggtaggcgctccgcaggccggggcatacaacgcttccaagggggcggtacgtatcatgtcgaaaagcgcagcgctggattgcgcactgaaggactacgatgtgcgtgtcaacacagtacatccgggcgcgatcaagaccgagtcgaaggatcagctggaaggttgggagcagctgatgtcacagcgtacggcgacccctatgggccacattggcgaaccgaatgacatcgcatggatctgtgtgtacctggcatctgacgaatcgaaatttgcgacgggtgcagaatttgtggtcgacggcgggtacaccgcacag

SEQ ID NO: 398 - protein, 252 aa, Artificial Sequence
  Engineered Variant of Kred from Lactobacillus kefir
MTDRLKHKVAIITGGTMGIGLAIADKFVEEGAKVVITGRHADVGEKAAKSIGGSDVIRFVQHDASEERGWTDLFDTTEEAFGPVTTLVNNAGIGVIKSVEQTTTEEWRDVLSVNLDGVFFGTRLGIQRMKNKGLGASIINMSSIMGLVGAPQAGAYNASKGAVRIMSKSAALDCALKDYDVRVNTVHPGAIKTESKDQLEGWEQLMSQRTATPMGHIGEPNDIAWICVYLASDESKFATGAEFVVDGGYTAQ

SEQ ID NO: 399 - DNA, 756 bp, Artificial Sequence
  Engineered Variant of Kred from Lactobacillus kefir
atgaccgatcgtctgaagcacaaagtagccatcatcaccggcgggacaatgggtatcggtttggcaatcgccgataaatttgtagaggagggtgcgaaagtagttattactggtcgtcacgcggatgtaggtgagaaagccgccaaatcaatcggtggcagtgatgttattcgctttgtccagcacgatgcgtccgaagaagagggctggacggacctgttcgacaccaccgaggaggcattcggcccggttacgaccctggtgaacaatgcagggattggggtaattaagagcgttgaaaagactactacggaggaatggcgtgatgttctgtccgttaatctggatggtgtttttttcggcacccgtctgggcattcagcgcatgaaaaataaaggcttgggcgctagcatcatcaatatgagcagtattatggggctggtaggcgctccgcaggccggggcatacaacgcttccaagggggcggtacgtatcatgtcgaaaagcgcagcgctggattgcgcactgaaggactacgatgtgcgtgtcaacacagtacatccgggcgcgatcaagaccgagtcgaaggatcagctggaaggttgggagcagctgatgtcacagcgtacggcgacccctatgggccacattggcgaaccgaatgacatcgcatggatctgtgtgtacctggcatctgacgaatcgaaatttgcgacgggtgcagaatttgtggtcgacggcgggtacaccgcacag

SEQ ID NO: 400 - protein, 252 aa, Artificial Sequence
  Engineered Variant of Kred from Lactobacillus kefir
MTDRLKHKVAIITGGTMGIGLAIADKFVEEGAKVVITGRHADVGEKAAKSIGGSDVIRFVQHDASEEEGWTDLFDTTEEAFGPVTTLVNNAGIGVIKSVEKTTTEEWRDVLSVNLDGVFFGTRLGIQRMKNKGLGASIINMSSIMGLVGAPQAGAYNASKGAVRIMSKSAALDCALKDYDVRVNTVHPGAIKTESKDQLEGWEQLMSQRTATPMGHIGEPNDIAWICVYLASDESKFATGAEFVVDGGYTAQ

SEQ ID NO: 401 - DNA, 756 bp, Artificial Sequence
  Engineered Variant of Kred from Lactobacillus kefir
atgaccgatcgtctgaagcacaaagtagccatcatcaccggcgggacaatgggtatcggtttggcaatcgccgataaatttgtagaggagggtgcgaaagtagttattactggtcgtcacgcggatgtaggtgagaaagccgccaaatcaatcggtggcagtgatgttattcgctttgtccagcacgatgcgtccgaagaagcgggctggacgacgctgttcgacaccaccgaggaggcattcggcccggttacgaccctggtgaacaatgcagggattggggtaattaagagcgttgaaatgactactacggaggaatggcgtgatgttctgtccgttaatctggatggtgtttttttcggcacccgtctgggcattcagcgcatgaaaaataaaggcttgggcgctagcatcatcaatatgagcagtattatggggctggtaggcgctccggccgccggggcatacaacgcttccaagggggcggtacgtatcatgtcgaaaagcgcagcgctggattgcgcactgaaggactacgatgtgcgtgtcaacacagtacatccgggcgcgatcaagaccgagtcgaaggatcagctggaaggttgggagcagctgatgtcacagcgtacggcgacccctatgggccacattggcgaaccgaatgacatcgcatggatctgtgtgtacctggcatctgacgaatcgaaatttgcgacgggtgcagaatttgtggtcgacggcgggtacaccgcacag

SEQ ID NO: 402 - protein, 252 aa, Artificial Sequence
  Engineered Variant of Kred from Lactobacillus kefir
MTDRLKHKVAIITGGTMGIGLAIADKFVEEGAKVVITGRHADVGEKAAKSIGGSDVIRFVQHDASEEAGWTTLFDTTEEAFGPVTTLVNNAGIGVIKSVEMTTTEEWRDVLSVNLDGVFFGTRLGIQRMKNKGLGASIINMSSIMGLVGAPAAGAYNASKGAVRIMSKSAALDCALKDYDVRVNTVHPGAIKTESKDQLEGWEQLMSQRTATPMGHIGEPNDIAWICVYLASDESKFATGAEFVVDGGYTAQ

SEQ ID NO: 403 - DNA, 756 bp, Artificial Sequence
  Engineered Variant of Kred from Lactobacillus kefir
atgaccgatcgtctgaagcacaaagtagccatcatcaccggcgggacaatgggtatcggtttggcaatcgccgataaatttgtagaggagggtgcgaaagtagttattactggtcgtcacgcggatgtaggtgagaaagccgccaaatcaatcggtggcagtgatgttattcgctttgtccagcacgatgcgtccgaagaacgtggctggacgcgcctgttcgacaccaccgaggaggcattcggcccggttacgaccctggtgaacaatgcagggattggggtaattaagagcgttgaacggactaccacggaggaatggcgtgatgttctgtccgttaatctggatggtgtttttttcggcacccgtgagggcattcagcgcatgaaaaataaaggcttgggcgctagcatcatcaatatgagcagtattatggggctggtaggcgctccggccgccggggcatacaacgcttccaagggggcggtacgtatcatgtcgaaaagcgcagcgctggattgcgcactgaaggactacgatgtgcgtgtcaacacagtacatccgggcgcgatcaagaccgagtcgaaggatcagctggaaggttgggagcaggcaatgtcacagcgtacggcgacccctatgggccacattggcgaaccgaatgacatcgcatggatctgtgtgtacctggcatctgacgaatcgaaatttgcgacgggtgcagaatttgtggtcgacggcgggtacaccgcacag

SEQ ID NO: 404 - protein, 252 aa, Artificial Sequence
  Engineered Variant of Kred from Lactobacillus kefir
MTDRLKHKVAIITGGTMGIGLAIADKFVEEGAKVVITGRHADVGEKAAKSIGGSDVIRFVQHDASEERGWTRLFDTTEEAFGPVTTLVNNAGIGVIKSVERTTTEEWRDVLSVNLDGVFFGTREGIQRMKNKGLGASIINMSSIMGLVGAPAAGAYNASKGAVRIMSKSAALDCALKDYDVRVNTVHPGAIKTESKDQLEGWEQAMSQRTATPMGHIGEPNDIAWICVYLASDESKFATGAEFVVDGGYTAQ

SEQ ID NO: 405 - DNA, 756 bp, Artificial Sequence
  Engineered Variant of Kred from Lactobacillus kefir
atgaccgatcgtctgaagcacaaagtagccatcatcaccggcgggacaatgggtatcggtttggcaatcgccgataaatttgtagaggagggtgcgaaagtagttattactggtcgtcacgcggatgtaggtgagaaagccgccaaatcaatcggtggcagtgatgttattcgctttgtccagcacgatgcgtccgaagaacgtggctggacgcgcctgttcgacaccaccgaggaggcattcggcccggttacgaccctggtgaacaatgcagggattggggtaattaagagcgttgaacgcactactacggaggaatggcgtgatgttctgtccgttaatctggatggtgtttttttcggcacccgtgagggcattcagcgcatgaaaaataaaggcttgggcgctagcatcatcaatatgagcagtattatggggctggtaggcgctccgcaggccggggcatacaacgcttccaagggggcggtacgtatcatgtcgaaaagcgcagcgctggattgcgcactgaaggactacgatgtgcgtgtcaacacagtacatccgggcgcgatcaagaccgagtcgaaggatcagctggaaggttgggagcaggcaatgtcacagcgtacggcgacccctatgggccacattggcgaaccgaatgacatcgcatggatctgtgtgtacctggcatctgacgaatcgaaatttgcgacgggtgcagaatttgtggtcgacggcgggtacaccgcacag

SEQ ID NO: 406 - protein, 252 aa, Artificial Sequence
  Engineered Variant of Kred from Lactobacillus kefir
MTDRLKHKVAIITGGTMGIGLAIADKFVEEGAKVVITGRHADVGEKAAKSIGGSDVIRFVQHDASEERGWTRLFDTTEEAFGPVTTLVNNAGIGVIKSVERTTTEEWRDVLSVNLDGVFFGTREGIQRMKNKGLGASIINMSSIMGLVGAPQAGAYNASKGAVRIMSKSAALDCALKDYDVRVNTVHPGAIKTESKDQLEGWEQAMSQRTATPMGHIGEPNDIAWICVYLASDESKFATGAEFVVDGGYTAQ

SEQ ID NO: 407 - DNA, 756 bp, Artificial Sequence
  Engineered Variant of Kred from Lactobacillus kefir
atgaccgatcgtctgaagcacaaagtagccatcatcaccggcgggacaatgggtatcggtttggcaatcgccgataaatttgtagaggagggtgcgaaagtagttattactggtcgtcacgcggatgtaggtgagaaagccgccaaatcaatcggtggcagtgatgttattcgctttgtccagcacgatgcgtccgaagaagcgggctggacggacctgttcgacaccaccgaggaggcattcggcccggttacgaccctggtgaacaatgcagggattggggtaattaagagcgttgaacggactaccacggaggaatggcgtgatgttctgtccgttaatctggatggtgtttttttcggcacccgtctgggcattcagcgcatgaaaaataaaggcttgggcgctagcatcatcaatatgagcagtattatggggctggtaggcgctccgcaggccggggcatacaacgcttccaagggggcggtacgtatcatgtcgaaaagcgcagcgctggattgcgcactgaaggactacgatgtgcgtgtcaacacagtacatccgggcgcgatcaagaccgagtcgaaggatcagctggaaggttgggagcaggcaatgtcacagcgtacggcgacccctatgggccacattggcgaaccgaatgacatcgcatggatctgtgtgtacctggcatctgacgaatcgaaatttgcgacgggtgcagaatttgtggtcgacggcgggtacaccgcacag

SEQ ID NO: 408 - protein, 252 aa, Artificial Sequence
  Engineered Variant of Kred from Lactobacillus kefir
MTDRLKHKVAIITGGTMGIGLAIADKFVEEGAKVVITGRHADVGEKAAKSIGGSDVIRFVQHDASEEAGWTDLFDTTEEAFGPVTTLVNNAGIGVIKSVERTTTEEWRDVLSVNLDGVFFGTRLGIQRMKNKGLGASIINMSSIMGLVGAPQAGAYNASKGAVRIMSKSAALDCALKDYDVRVNTVHPGAIKTESKDQLEGWEQAMSQRTATPMGHIGEPNDIAWICVYLASDESKFATGAEFVVDGGYTAQ

SEQ ID NO: 409 - DNA, 756 bp, Artificial Sequence
  Engineered Variant of Kred from Lactobacillus kefir
atgaccgatcgtctgaagcacaaagtagccatcatcaccggcgggacaatgggtatcggtttggcaatcgccgataaatttgtagaggagggtgcgaaagtagttattactggtcgtcacgcggatgtaggtgagaaagccgccaaatcaatcggtggcagtgatgttattcgctttgtccagcacgatgcgtccgaagaacgtggctggacgacgctgttcgacaccaccgaggaggcattcggcccggttacgaccctggtgaacaatgcagggattggggtaattaagagcgttgaacggactaccacggaggaatggcgtgatgttctgtccgttaatctggatggtgtttttttcggcacccgtgagggcattcagcgcatgaaaaataaaggcttgggcgctagcatcatcaatatgagcagtattatggggctggtaggcgctccggccgccggggcatacaacgcttccaagggggcggtacgtatcatgtcgaaaagcgcagcgctggattgcgcactgaaggactacgatgtgcgtgtcaacacagtacatccgggcgcgatcaagaccgagtcgaaggatcagctggaaggttgggagcagctgatgtcacagcgtacggcgacccctatgggccacattggcgaaccgaatgacatcgcatggatctgtgtgtacctggcatctgacgaatcgaaatttgcgacgggtgcagaatttgtggtcgacggcgggtacaccgcacag

SEQ ID NO: 410 - protein, 252 aa, Artificial Sequence
  Engineered Variant of Kred from Lactobacillus kefir
MTDRLKHKVAIITGGTMGIGLAIADKFVEEGAKVVITGRHADVGEKAAKSIGGSDVIRFVQHDASEERGWTTLFDTTEEAFGPVTTLVNNAGIGVIKSVERTTTEEWRDVLSVNLDGVFFGTREGIQRMKNKGLGASIINMSSIMGLVGAPAAGAYNASKGAVRIMSKSAALDCALKDYDVRVNTVHPGAIKTESKDQLEGWEQLMSQRTATPMGHIGEPNDIAWICVYLASDESKFATGAEFVVDGGYTAQ

SEQ ID NO: 411 - DNA, 756 bp, Artificial Sequence
  Engineered Variant of Kred from Lactobacillus kefir
atgaccgatcgtctgaagcacaaagtagccatcatcaccggcgggacaatgggtatcggtttggcaatcgccgataaatttgtagaggagggtgcgaaagtagttattactggtcgtcacgcggatgtaggtgagaaagccgccaaatcaatcggtggcagtgatgttattcgctttgtccagcacgatgcgtccgaagaacgtggctggacgacgctgttcgacaccaccgaggaggcattcggcccggttacgaccctggtgaacaatgcagggattggggtaattaagagcgttgaacaaactactacggaggaatggcgtgatgttctgtccgttaatctggatggtgtttttttcggcacccgtgagggcattcagcgcatgaaaaataaaggcttgggcgctagcatcatcaatatgagcagtattatggggctggtaggcgctccgcaggccggggcatacaacgcttccaagggggcggtacgtatcatgtcgaaaagcgcagcgctggattgcgcactgaaggactacgatgtgcgtgtcaacacagtacatccgggcgcgatcaagaccgagtcgaaggatcagctggaaggttgggagcagctgatgtcacagcgtacggcgacccctatgggccacattggcgaaccgaatgacatcgcatggatctgtgtgtacctggcatctgacgaatcgaaatttgcgacgggtgcagaatttgtggtcgacggcgggtacaccgcacag

SEQ ID NO: 412 - protein, 252 aa, Artificial Sequence
  Engineered Variant of Kred from Lactobacillus kefir
MTDRLKHKVAIITGGTMGIGLAIADKFVEEGAKVVITGRHADVGEKAAKSIGGSDVIRFVQHDASEERGWTTLFDTTEEAFGPVTTLVNNAGIGVIKSVEQTTTEEWRDVLSVNLDGVFFGTREGIQRMKNKGLGASIINMSSIMGLVGAPQAGAYNASKGAVRIMSKSAALDCALKDYDVRVNTVHPGAIKTESKDQLEGWEQLMSQRTATPMGHIGEPNDIAWICVYLASDESKFATGAEFVVDGGYTAQ

1. A process for the preparation of dihydro-(rho)-isoalpha acids, comprising treating isoalpha acids with a ketoreductase enzyme or a microorganism expressing a gene that encodes the ketoreductase.

2. The process according to claim 1, wherein the process is carried out in an aqueous system.

3. The process according to claim 2, wherein the process is carried out under mild temperature and pH conditions.

4. The process according to claim 1, comprising addition of the ketoreductase enzyme and NADPH or NADP to a mixture of isoalpha acids followed by incubation.

5. The process according to claim 1, comprising adding the ketoreductase enzyme and NADPH or NADP to a mixture of isoalpha acids in the presence of isopropanol for cofactor recycling, followed by incubation.

6. The process according to claim 1, wherein the concentration of isoalpha acids, i.e. the substrate, is maximized to increase the volumetric productivity of the bioconversion.

7. The process according to claim 1, wherein the concentration of the cofactor NADPH or NADP in the mixture is minimized to improve the economics of the bioconversion.

8. The process according to claim 1, wherein the reaction is carried out in a vessel purged of air using an inert gas such as nitrogen or argon to prevent the production of degradation products.

9. The process according to claim 1, comprising adding the ketoreductase enzyme and NADPH or NADP to a mixture of isoalpha adds in the presence of another enzyme for cofactor recycling, followed by incubation.

10. The process according to claim 1, comprising adding a whole cell biocatalyst, wherein the whole cell biocatalyst is an immobilized microorganism expressing the gene which encodes a ketoreductase, to a mixture of isoalpha acids followed by incubation.

11. The process according to claim 1, comprising treating isoalpha acids with a growing microorganism expressing a gene which encodes the ketoreductase.

12. The process according to claim 1, comprising adding the ketoreductase enzyme, wherein the ketoreductase is thermostable, to an extract of isoalpha acids wherein heat is applied, and the mixture is incubated.

13. The process according to claim 1, wherein the ketoreductase specifically reduces cis-isohumulone, cis-isocohumulone, and cis-isoadhumulone.

14. The process according to claim 1, wherein the ketoreductase specifically reduces trans-isohumulone, trans-isocohumulone, and trans-isoadhumulone.

15. The process according to claim 1, comprising adding a mixture of 2 or more ketoreductase enzymes to reduce, a mixture of cis-and trans-isoalpha acids, to their respective dihydroisoalpha acids.

16. The process according to claim 14, wherein the mixture of 2 or more ketoreductase enzymes produces a unique mixture of dihydroisoalpha acids that is distinct from that produced by chemical reducing agents, such as sodium borohydride.

17. The process according to claim 1, wherein the ketoreductase is 99, 95, 90, 85, 80, 75 or 70 percent homologous to the ketoreductase enzyme selected from the group consisting of SEQ ID NO: 172, SEQ ID NO: 186, SEQ ID NO: 184, SEQ ID NO: 196, SEQ ID NO: 252, SEQ ID NO: 270, SEQ ID NO: 272, SEQ ID NO: 286, SEQ ID NO: 300, SEQ ID NO: 328, SEQ ID NO: 330, SEQ ID NO: 346, SEQ ID NO: 348 and SEQ ID NO: 356.
